(19) United States
(12) Patent Application Publication
(10) Pub. No.: US 2024/0299507 A1
(43) Pub. Date: Sep. 12, 2024

(54) HUMANIZED ANTI-MUC1* ANTIBODIES AND DIRECT USE OF CLEAVAGE ENZYME

(71) Applicant: Minerva Biotechnologies Corporation, Waltham, MA (US)

(72) Inventor: Cynthia Bamdad, Boston, MA (US)

(21) Appl. No.: 18/414,324

(22) Filed: Jan. 16, 2024

Related U.S. Application Data
(63) Continuation of application No. 16/767,357, filed on May 27, 2020, now abandoned.
(60) Provisional application No. 62/591,120, filed on Nov. 27, 2017.

(51) Int. Cl. A61K 38/48; A61K 35/17; A61K 39/00; A61P 35/00; C07K 14/54; C07K 14/725; C07K 16/30

(52) U.S. Cl. CPC A61K 38/4886; A61K 35/17; A61K 39/00117; A61P 35/00; C07K 14/5418; C07K 14/5434; C07K 14/5443; C07K 14/7051; C07K 16/3092; A61K 2039/505; C07K 2317/24; C07K 2317/622; C12Y 304/24

(57) ABSTRACT

The present application discloses humanized antibodies and antibody like proteins and fragments thereof and the use of proteolytic cleavage enzymes.

### CROSS-REFERENCE

[0001] This application is a continuation of U.S. patent application Ser. No. 16/767,357, filed May 27, 2020, now abandoned, which is a national stage entry of International Application No. PCT/US18/62569, filed Nov. 27, 2018, which claims the benefit of U.S. Provisional Application No. 62/591,120, filed Nov. 27, 2017, the contents of which are incorporated herein by reference in their entirety.

### SEQUENCE LISTING

[0002] The instant application contains a Sequence Listing which has been submitted electronically in XML format and is hereby incorporated by reference in its entirety. Said XML copy, created on Mar. 21, 2024, is named 56699-737.301_Replacement SL.xml and is 1,390,328 bytes in size.

### BACKGROUND OF THE INVENTION

### 1. Field of the Invention

[0003] The present application relates to humanized and non-human anti-MUC1* antibodies and methods of making and using them. The present application also relates to using an immune cell transfected or transduced with a cleavage enzyme for the treatment of cancer. The present invention also relates to using an immune cells transfected or transduced with a CAR and another protein for the treatment of cancer.

### 2. General Background and State of the Art

[0004] We previously discovered that a cleaved form of the MUC1 (SEQ ID NO:1) transmembrane protein is a growth factor receptor that drives the growth of over 75% of all human cancers. The cleaved form of MUC1, which we called MUC1* (pronounced muk 1 star), is a powerful growth factor receptor. Cleavage and release of the bulk of the extracellular domain of MUC1 unmasks a binding site for activating ligands dimeric NME1, NME6, NME7, NME7_{AB}, NME7-X1 or NME8. It is an ideal target for cancer drugs as it is aberrantly expressed on over 75% of all cancers and is likely overexpressed on an even higher percentage of metastatic cancers (Mahanta et al. (2008) A Minimal Fragment of MUC1 Mediates Growth of Cancer Cells. PLOS ONE 3(4): e2054. doi:10.1371/journal.pone.0002054; Fessler et al. (2009), “MUC1* is a determinant of trastuzumab (Herceptin) resistance in breast cancer cells,” Breast Cancer Res Treat. 118(1): 113-124). After MUC1 cleavage most of its extracellular domain is shed from the cell surface. The remaining portion has a truncated extracellular domain that comprises most or all of the primary growth factor receptor sequence called PSMGFR (SEQ ID NO:2).

[0005] Antibodies are increasingly used to treat human diseases. Antibodies generated in non-human species have historically been used as therapeutics in humans, such as horse antibodies. More recently, antibodies are engineered or selected so that they contain mostly human sequences in order to avoid a generalized rejection of the foreign antibody. The process of engineering recognition fragments of a non-human antibody into a human antibody is generally called ‘humanizing’. The amount of non-human sequences that are used to replace the human antibody sequences determines whether they are called chimeric, humanized or fully human.

[0006] Alternative technologies exist that enable generation of humanized or fully human antibodies. These strategies involve screening libraries of human antibodies or antibody fragments and identifying those that bind to the target antigen, rather than immunizing an animal with the antigen. Another approach is to engineer the variable region(s) of an antibody into an antibody-like molecule. Another approach involves immunizing a humanized animal. The present invention is intended to also encompass these approaches for use with recognition fragments of antibodies that the inventors have determined bind to the extracellular domain of MUC1*.

[0007] In addition to treating patients with an antibody, cancer immunotherapies have recently been shown to be effective in the treatment of blood cancers. One cancer immunotherapy, called CAR T (chimeric antigen receptor T cell) therapy, engineers a T cell so that it expresses a chimeric receptor having an extra cellular domain that recognizes a tumor antigen, and a transmembrane and cytoplasmic tail of a T cell (Dai H, Wang Y, Lu X, Han W. (2016) Chimeric Antigen Receptors Modified T-Cells for Cancer Therapy. J Natl Cancer Inst. 108(7): djv439). Such receptor is composed of an single chain antibody fragment (scFv) that recognizes a tumor antigen, linked to a T cell transmembrane and signaling domains. Upon binding of the receptor to a cancer associated antigen, a signal is transmitted resulting in T-cell activation, propagation and the targeted killing of the cancer cells. In practice, a patient's T cells are isolated and transduced with a CAR, expanded and then injected back into the patient. When the patient's CAR T cells bind to the antigen on a cancer cell, the CAR T cells expand and attack the cancer cells. A drawback of this method is the risk of activating the patient's immune system to destroy cells bearing the target antigen, when most cancer antigens are expressed on some healthy tissues, but overexpressed on cancerous tissues. To minimize the risk of off-tumor/on-target effects, the cancer antigen should be minimally expressed on healthy tissues.

[0008] Another cancer immunotherapy involves BiTEs (Bi-specific T cell Engagers). The BiTE approach attempts to eliminate the CAR T associated risk of off-tumor/on-target effects. Unlike CAR T, BiTEs are bispecific antibodies that should not pose any greater risk than regular antibody-based therapies. However, unlike typical anti-cancer antibodies that bind to and block a cancer antigen, BiTEs are designed to bind to an antigen on the tumor cell and simultaneously bind to an antigen on an immune cell, such as a T cell. In this way, a BiTE recruits the T cell to the tumor. BiTEs are engineered proteins that simultaneously bind to a cancer associated antigen and a T-cell surface protein such as CD3-epsilon. BiTEs are antibodies made by genetically linking the scFv's of an antibody that binds to a T cell antigen, like anti-CD3-epsilon to a scFv of a therapeutic monoclonal antibody that binds to a cancer antigen (Patrick A. Baeuerle, and Carsten Reinhardt (2009) Bispecific T-cell engaging antibodies for cancer therapy. Cancer Res. 69(12):4941-4944).

### SUMMARY OF THE INVENTION

[0009] In one aspect, the present invention is directed to a non-human, human or humanized anti-MUC1* antibody or antibody fragment or antibody-like protein that binds to a region on extracellular domain of MUC1 isoform or cleavage product that is devoid of the tandem repeat domains. The non-human, human or humanized anti-MUC1* antibody or antibody fragment or antibody-like protein may specifically bind to
[0010] (i) PSMGFR region of MUC1;
[0011] (ii) PSMGFR peptide;
[0012] (iii) a peptide having amino acid sequence of SNIKFRPGSVVVQLTLAFREGTINVHDVETQFNQYKTEAASRY (SEQ ID NO:620);
[0013] (iv) a peptide having amino acid sequence of SVVVQLTLAFREGTINVHDVETQFNQYKTEAASRY (SEQ ID NO:621);
[0014] (v) a peptide having amino acid sequence of VQLTLAFREGTINVHDVETQFNQY (SEQ ID NO:622); or
[0015] (vi) a peptide having amino acid sequence of SNIKFRPGSVVVQLTLAFREGTIN (SEQ ID NO:623).

[0016] The non-human, human or humanized antibody may be IgG1, IgG2, IgG3, IgG4 or IgM. The human or humanized antibody fragment or antibody-like protein may be scFv or scFv-Fc.

[0017] The human or humanized antibody, antibody fragment or antibody-like protein as in above may comprise a heavy chain variable region and light chain variable region which is derived from mouse monoclonal MN-E6 antibody, and has at least 80%, 90% or 95% or 98% sequence identity to the mouse monoclonal MN-E6 antibody. The heavy chain variable region may have at least 90% or 95% or 98% sequence identity to SEQ ID NO:13 and the light chain variable region may have at least 90% or 95% or 98% sequence identity to SEQ ID NO:66.

[0018] The human or humanized antibody, antibody fragment or antibody-like protein according to above may include complementarity determining regions (CDRs) in the heavy chain variable region and light chain variable region having at least 90% or 95% or 98% sequence identity to CDR1, CDR2 or CDR3 regions having sequence as follows:
[0019] CDR 1 heavy chain SEQ ID NO:17
[0020] CDR1 light chain SEQ ID NO:70,
[0021] CDR2 heavy chain SEQ ID NO:21
[0022] CDR2 light chain SEQ ID NO:74,
[0023] CDR3 heavy chain SEQ ID NO:25
[0024] CDR3 light chain SEQ ID NO:78.

[0025] The human or humanized antibody, antibody fragment or antibody-like protein described above may include a heavy chain variable region and light chain variable region which is derived from mouse monoclonal MN-C2 antibody, and has at least 80%, 90% or 95% or 98% sequence identity to the mouse monoclonal MN-C2 antibody. The heavy chain variable region may have at least 90% or 95% or 98% sequence identity to SEQ ID NO:119 and the light chain variable region has at least 90% or 95% or 98% sequence identity to SEQ ID NO:169. The complementarity determining regions (CDRs) in the heavy chain variable region and light chain variable region may have at least 90% or 95% or 98% sequence identity to CDR1, CDR2 or CDR3 regions having sequence as follows:
[0026] CDR1 heavy chain SEQ ID NO:123
[0027] CDR1 light chain SEQ ID NO:173,
[0028] CDR2 heavy chain SEQ ID NO:127
[0029] CDR2 light chain SEQ ID NO:177,
[0030] CDR3 heavy chain SEQ ID NO:131
[0031] CDR3 light chain SEQ ID NO:181.

[0032] The human or humanized antibody, antibody fragment or antibody-like protein as in above may include a heavy chain variable region and light chain variable region which is derived from mouse monoclonal MN-C3 antibody, and may have at least 80%, 90% or 95% or 98% sequence identity to the mouse monoclonal MN-C3 antibody. The heavy chain variable region may have at least 90% or 95% or 98% sequence identity to SEQ ID NO:414 and the light chain variable region may have at least 90% or 95% or 98% sequence identity to SEQ ID NO:459. The complementarity determining regions (CDRs) in the heavy chain variable region and light chain variable region may have at least 90% or 95% or 98% sequence identity to CDR1, CDR2 or CDR3 regions having sequence as follows:
[0033] CDR 1 heavy chain SEQ ID NO:418
[0034] CDR1 light chain SEQ ID NO:463,
[0035] CDR2 heavy chain SEQ ID NO:422
[0036] CDR2 light chain SEQ ID NO:467,
[0037] CDR3 heavy chain SEQ ID NO:426,
[0038] CDR3 light chain SEQ ID NO:471.

[0039] The human or humanized antibody, antibody fragment or antibody-like protein described above may include a heavy chain variable region and light chain variable region which is derived from mouse monoclonal MN-C8 antibody, and has at least 80%, 90% or 95% or 98% sequence identity to the mouse monoclonal MN-C8 antibody. The heavy chain variable region may have at least 90% or 95% or 98% sequence identity to SEQ ID NO:506 and the light chain variable region may have at least 90% or 95% or 98% sequence identity to SEQ ID NO:544. The complementarity determining regions (CDRs) in the heavy chain variable region and light chain variable region may have at least 90% or 95% or 98% sequence identity to CDR1, CDR2 or CDR3 regions having sequence as follows:
[0040] CDR1 heavy chain SEQ ID NO:508
[0041] CDR 1 light chain SEQ ID NO:546,
[0042] CDR2 heavy chain SEQ ID NO:510
[0043] CDR2 light chain SEQ ID NO:548,
[0044] CDR3 heavy chain SEQ ID NO:512,
[0045] CDR3 light chain SEQ ID NO:550.

[0046] In another aspect, the present invention is directed to an anti-MUC1* extracellular domain antibody comprised of sequences of a humanized MN-E6 represented by humanized IgG2 heavy chain, or humanized IgG1 heavy chain, paired with humanized Kappa light chain, or humanized Lambda light chain. The humanized IgG2 heavy chain may be SEQ ID NOS:53, humanized IgG1 heavy chain may be SEQ ID NO:57, humanized Kappa light chain may be SEQ ID NO:108, and humanized Lambda light chain may be SEQ ID NO:112, or a sequence having 90%, 95% or 98% sequence identity thereof.

[0047] In another aspect, the invention is directed to an anti-MUC1* extracellular domain antibody comprised of sequences of a humanized MN-C2 represented by humanized IgG1 heavy chain, humanized IgG2 heavy chain, paired with humanized Lambda light chain, and humanized Kappa light chain. The humanized IgG1 heavy chain MN-C2 may be SEQ ID NOS:159 or IgG2 heavy chain may be SEQ ID NOS:164 paired with Lambda light chain (SEQ ID NO:219) or Kappa light chain (SEQ ID NO:213), or a sequence having 90%, 95% or 98% sequence identity thereof.

[0048] In another aspect, the invention is directed to an anti-MUC1* extracellular domain antibody comprised of sequences of a humanized MN-C3 represented by humanized IgG1 heavy chain or humanized IgG2 heavy chain paired with humanized Lambda light chain or humanized Kappa light chain. The humanized MN-C3 IgG1 heavy chain may be SEQ ID NOS:454, IgG2 heavy chain may be SEQ ID NOS:456, Lambda light chain may be SEQ ID NO:501, and Kappa light chain may be SEQ ID NO:503, or a sequence having 90%, 95% or 98% sequence identity thereof.

[0049] In another aspect, the invention is directed to an anti-MUC1* extracellular domain antibody comprised of sequences of a humanized MN-C8 represented by humanized IgG1 heavy chain or humanized IgG2 heavy chain paired with humanized Lambda light chain or humanized Kappa light chain. The humanized MN-C8 IgG1 heavy chain may be SEQ ID NOS:540, IgG2 heavy chain may be SEQ ID NOS:542, Lambda light chain may be SEQ ID NO:580 and Kappa light chain may be SEQ ID NO:582, or a sequence having 90%, 95% or 98% sequence identity thereof.

[0050] In another aspect, the invention is directed to a human or humanized anti-MUC1* antibody or antibody fragment or antibody-like protein according to above, which inhibits the binding of NME protein to MUC1*. The NME may be NME1, NME6, NME7AB, NME7-X1, NME7 or NME8.

[0051] In yet another aspect, the invention is directed to a single chain variable fragment (scFv) comprising a heavy and light chain variable regions connected via a linker, further comprising CDRs of antibodies that bind to MUC1* extracellular domain. The CDRs may be derived from MN-E6, MN-C2, MN-C3 or MN-C8 antibodies or humanized antibodies thereof. The scFv may be one that possesses the SEQ ID NOS:233, 235 and 237 (E6); SEQ ID NOS:239, 241, and 243 (C2); SEQ ID NOS:245, 247, and 249 (C3); or SEQ ID NOS:251, 253, and 255 (C8).

[0052] In still another aspect, the invention is directed to a chimeric antigen receptor (CAR) comprising a scFv or a humanized variable region that binds to the extracellular domain of a MUC1 that is devoid of tandem repeats, a linker molecule, a transmembrane domain and a cytoplasmic domain. The single chain antibody fragment may bind to
[0053] (i) PSMGFR region of MUC1,
[0054] (ii) PSMGFR peptide,
[0055] (iii) a peptide having amino acid sequence SNIKFRPGSVVVQLTLAFREGTINVHDVETQFNQYKTEAASRY (SEQ ID NO:620);
[0056] (iv) a peptide having amino acid sequence of SVVVQLTLAFREGTINVHDVETQFNQYKTEAASRY (SEQ ID NO:621);
[0057] (v) a peptide having amino acid sequence of VQLTLAFREGTINVHDVETQFNQY (SEQ ID NO:622); or
[0058] (vi) a peptide having amino acid sequence of SNIKFRPGSVVVQLTLAFREGTIN (SEQ ID NO:623).

[0059] In the CAR as described above, portions of any of the variable regions set forth and described above, or combination thereof may be used in the extracellular domain of the CAR. The CAR also comprises a transmembrane region and a cytoplasmic tail that comprises sequence motifs that signal immune system activation. The extracellular domain may be comprised of non-human, or humanized single chain antibody fragments of an MN-E6 scFv, MN-C2 scFv, MN-C3 scFv or MN-C8 scFv.

[0060] In the CAR as described above, the extracellular domain may include a non-human or humanized single chain antibody fragments of an MN-E6 scFv set forth as SEQ ID NOS: 233, 235, or 237), MN-C2 scFv (SEQ ID NOS:239, 241, or 243), MN-C3 scFv (SEQ ID NOS: 245, 247, or 249) or MN-C8 scFv (SEQ ID NOS:251, 253, or 255).

[0061] In any of the CARs described above, the cytoplasmic tail may be comprised of one or more of signaling sequence motifs CD3-zeta, CD27, CD28, 4-1BB, OX40, CD30, CD40, ICAm-1, LFA-1, ICOS, CD2, CD5, or CD7.

[0062] In any of the CARs described above, the sequence may be CARMN-E6 CD3z (SEQ ID NOS:295), CARMN-E6 CD28/CD3z (SEQ ID NOS:298); CARMN-E6 4-1BB/CD3z (SEQ ID NOS:301); CARMN-E6 OX40/CD3z (SEQ ID NOS:617); CARMN-E6 CD28/4-1BB/CD3z (SEQ ID NOS:304); CARMN-E6 CD28/OX40/CD3z (SEQ ID NOS:619); CAR MN-C2 CD3z (SEQ ID NOS:607); CAR MN-C2 CD28/CD3z (SEQ ID NOS:609); CAR MN-C2 4-1BB/CD3z (SEQ ID NOS:611 and SEQ ID NOS: 719); CAR MN-C2 OX40/CD3z (SEQ ID NOS:613); CAR MN-C2 CD28/4-1BB/CD3z (SEQ ID NOS: 307); CAR MN-C2 CD28/OX40/CD3z (SEQ ID NOS:615) or CAR MN-C3 4-1BB/CD3z (SEQ ID NOS: 601).

[0063] In another aspect, the CAR may have an extracellular domain unit that recognizes a peptide. The peptide may be PSMGFR (SEQ ID NO:2). The peptide may be a peptide derived from NME7. The peptide may be

NME7A peptide 1 (A domain):
(SEQ ID NO: 7)
MLSRKEALDFHVDHQS;
NME7A peptide 2 (A domain):
(SEQ ID NO: 8)
SGVARTDASES;
NME7B peptide 1 (B domain):
(SEQ ID NO: 9)
DAGFEISAMQMFNMDRVNVE;
NME7B peptide 2 (B domain):
(SEQ ID NO: 10)
EVYKGVVTEYHDMVTE;
or
NME7B peptide 3 (B domain):
(SEQ ID NO: 11)
AIFGKTKIQNAVHCTDLPEDGLLEVQYFF.

[0064] In another aspect, the invention is directed to a composition that includes at least two CARs with different extracellular domain units transfected into the same cell, which may be an immune cell, which may be derived from the patient requiring treatment for a cancer. The expression of the second CAR may be inducible and driven by the recognition of a target by the first CAR. The nucleic acid encoding the second CAR may be linked to an inducible promoter. The expression of the second CAR may be induced by an event that occurs specifically when the immune cell mounts an immune response to a target tumor cell. The antibody fragments of one or both of the CARs may direct the cell to a MUC1* positive tumor. The antibody fragments of the first and second CARs may bind to a MUC1* that is produced when MUC1 is cleaved by two different cleavage enzymes. Expression of the second CAR by the inducible promoter may be induced when the antibody fragment of the first CAR engages or binds to a MUC1 or MUC1* on the tumor. One way to do this is to induce expression of the second CAR when, or shortly after, an NFAT protein is expressed or translocated to the nucleus. For example, a sequence derived from an NFAT promoter region is put upstream of the gene for the second CAR. In this way, when the transcription factors that bind to the promoter of the NFAT protein are present in sufficient concentration to bind to and induce transcription of the NFAT protein, they will also bind to that same promoter that is engineered in front of the sequence for transcription of the second CAR. The NFAT protein may be NFAT1 also known as NFATc2, NFAT2 also known as NFATc or NFATc1, NFAT3 also known as NFATc4, NFAT4 also known as NFATc3, or NFAT5. In one aspect of the invention, the NFAT is NFATc1, NFATc3 or NFATc2. In one aspect of the invention, the NFAT is NFAT2 also known as NFATc1. SEQ ID NO:646 shows nucleic acid sequence of the upstream transcriptional regulatory region for NFAT2. The recognition unit of the second CAR may be an antibody fragment or a peptide, wherein the recognition units may bind to NME7, PD-1, PDL-1, or a checkpoint inhibitor.

[0065] The at least two CARs may have one CAR that does not have a tumor antigen targeting recognition unit and the other CAR does have a tumor antigen targeting recognition unit. In another aspect of the invention, one of the extracellular domain recognition units may bind to MUC1* extracellular domain. In another aspect of the invention, one of the extracellular domain recognition units may be an antibody fragment and the other is a peptide, which may be devoid of transmembrane and signaling motifs; the peptide may be a single chain antibody fragment. In another aspect of the invention, one of the recognition units may bind PD-1 or PDL-1. In another aspect of the invention, one extra cellular domain recognition unit is an anti-MUC1* scFv chosen from the group consisting of scFv of MN-E6 antibody, scFv of MN-C2 antibody, scFv of MN-C3 antibody or scFv of MN-C8 antibody and the other is a peptide derived from NME7 or chosen from the group consisting of

NME7A peptide 1 (A domain):
(SEQ ID NO: 7)
MLSRKEALDFHVDHQS;
NME7A peptide 2 (A domain):
(SEQ ID NO: 8)
SGVARTDASES;
NME7B peptide 1 (B domain):
(SEQ ID NO: 9)
DAGFEISAMQMFNMDRVNVE;
NME7B peptide 2 (B domain):
(SEQ ID NO: 10)
EVYKGVVTEYHDMVTE;
and
NME7B peptide 3 (B domain):
(SEQ ID NO: 11)
AIFGKTKIQNAVHCTDLPEDGLLEVQYFF.

[0066] In another aspect, the invention is directed to a cell comprising a CAR with an extracellular domain that binds to the extra cellular domain of a MUC1 molecule that is devoid of tandem repeats. In another aspect, the invention is directed to a cell comprising a CAR with an extracellular domain that binds to a MUC1* transfected or transduced cell. The cell that includes the CAR may be an immune system cell, preferably a T cell, a natural killer cell (NK), a dendritic cell or mast cell.

[0067] In another aspect, the invention is directed to an engineered antibody-like protein.

[0068] In another aspect, the invention is directed to a method of screening a library of antibodies or antibody fragments that are human, for those that bind to
[0069] (i) PSMGFR peptide;
[0070] (ii) a peptide having amino acid sequence SNIKFRPGSVVVQLTLAFREGTINVHDVETQFNQYKTEAASRY (SEQ ID NO:620);
[0071] (iii) a peptide having amino acid sequence of SVVVQLTLAFREGTINVHDVETQFNQYKTEAASRY (SEQ ID NO:621);
[0072] (iv) a peptide having amino acid sequence of VQLTLAFREGTINVHDVETQFNQY (SEQ ID NO:622);
[0073] (v) a peptide having amino acid sequence of SNIKFRPGSVVVQLTLAFREGTIN (SEQ ID NO:623);
[0074] (vi) NME7 protein; or
[0075] (vii) a peptide fragment of NME7 protein.

[0076] In another aspect, the invention is directed to a method for treating a disease in a subject comprising administering an antibody according to any claim above, to a person suffering from the disease, wherein the subject expresses MUC1 aberrantly. The disease may be cancer, such as breast cancer, ovarian cancer, lung cancer, colon cancer, gastric cancer or esophageal cancer.

[0077] In another aspect, the invention is directed to a method for treating a disease in a subject comprising administering an NME peptide, to a person suffering from the disease, wherein the subject expresses MUC1 aberrantly.

[0078] In another aspect, the invention is directed to a method of proliferating or expanding stem cell population comprising contacting the cells with the antibody according to any method or composition described above.

[0079] In another aspect, the invention is directed to a method of facilitating stem cell attachment to a surface comprising coating the surface with a humanized MN-C3 or MN-C8 antibody, antibody fragment or single chain antibody thereof and contacting stem cell to the surface.

[0080] In another aspect, the invention is directed to a method of delivering stem cell in vitro or in vivo comprising the steps of coating a surface with a humanized MN-C3 or MN-C8 antibody, antibody fragment or single chain antibody thereof, contacting the stem cell to the surface and delivering the stem cell to a specific location.

[0081] In another aspect, the invention is directed to a method of isolating stem cell comprising the steps of coating a surface with a humanized MN-C3 or MN-C8 antibody, antibody fragment or single chain antibody thereof, and contacting a mixed population of cells to the surface and isolating stem cell.

[0082] In another aspect, the invention is directed to a scFv comprising variable domain fragments derived from an antibody that binds to an extracellular domain of MUC1 isoform or cleavage product that is devoid of the tandem repeat domains. The variable domain fragments may be derived from mouse monoclonal antibody MN-E6 (SEQ ID NO:13 and 66) or from the humanized MN-E6 (SEQ ID NO: 39 and 94), or from MN-E6 scFv (SEQ ID NO: 233, 235 and 237). Or, the variable domain fragments may be derived from mouse monoclonal antibody MN-C2 (SEQ ID NO: 119 and 169) or from the humanized MN-C2 (SEQ ID NO: 145 and 195), or from MN-C2 scFv (SEQ ID NO: 239, 241 and 243). Or, the variable domain fragments may be derived from mouse monoclonal antibody MN-C3 (SEQ ID NO: 414 and 459) or from the humanized MN-C3 (SEQ ID NO: 440 and 487), or from MN-C3 scFv (SEQ ID NO: 245, 247 and 249). Or, the variable domain fragments may be derived from mouse monoclonal antibody MN-C8 (SEQ ID NO: 505 and 544) or from the humanized MN-C8 (SEQ ID NO: 526 and 566), or from MN-C8 scFv (SEQ ID NO: 251, 253, 255).

[0083] In another aspect, the invention is directed to a method for the treatment of a person diagnosed with, suspected of having or at risk of developing a MUC1 or MUC1* positive cancer involving administering to the person an effective amount of the scFv described above.

[0084] In another aspect, the invention is directed to a scFv-Fc construct comprising the scFv as described above. The scFv-Fc may be dimerized. The Fc component may be mutated so that scFv-Fc is monomeric. The mutation may include mutating or deleting hinge region on Fc, making F405Q, Y407R, T366W/L368W, or T364R/L368R mutation or combinations thereof on the Fc represented by SEQ ID NO: 281, 279, 285 and 287.

[0085] In another aspect, the invention is directed to a polypeptide comprising at least two different scFv sequences, wherein one of the scFv sequences is a sequence that binds to extracellular domain of MUC1 isoform or cleavage product that is devoid of the tandem repeat domains. The polypeptide may bind to
[0086] (i) PSMGFR region of MUC1;
[0087] (ii) PSMGFR peptide;
[0088] (iii) a peptide having amino acid sequence of SNIKFRPGSVVVQLTLAFREGTINVHDVETQFNQYKTEAASRY (SEQ ID NO:620);
[0089] (iv) a peptide having amino acid VQLTLAFREGTINVHDVETQFNQYKTEAASRY (SEQ ID NO:621); sequence of
[0090] (v) a peptide having amino acid sequence of VQLTLAFREGTINVHDVETQFNQY (SEQ ID NO:622); or
[0091] (vi) a peptide having amino acid sequence of SNIKFRPGSVVVQLTLAFREGTIN (SEQ ID NO:623).

[0092] The polypeptide may bind to a receptor on an immune cell, such as T cell, and in particular, CD3 on T-cell.

[0093] In another aspect, the invention is directed to a method of detecting presence of a cell that expresses MUC1* aberrantly, comprising contacting a sample of cells with the scFv-Fc described above and detecting for the presence of the binding of scFv-Fc to the cell. The cell may be cancer cell.

[0094] In another aspect, the invention is directed to a method for testing a subject's cancer for suitability of treatment with a composition comprising portions of the variable regions of MN-E6, MN-C2, MN-C3 or MN-C8, comprising the steps of contacting a bodily specimen from the patient with the corresponding MN-E6 scFv-Fc, MN-C2 scFv-Fc, MN-C3 scFv-Fc or MN-C8 scFv-Fc.

[0095] In another aspect, the invention is directed to a method of treating a subject suffering from a disease comprising, exposing T cells from the subject to MUC1* peptides wherein through various rounds of maturation, T cells develop MUC1* specific receptors, creating adapted T cells, and expanding and administering the adapted T cells to the donor patient who is diagnosed with, suspected of having, or is at risk of developing a MUC1* positive cancer.

[0096] In one aspect, the invention may be directed to an immune cell transfected or transduced with a cleavage enzyme for the treatment of cancer. The cancer may be a MUC1 positive cancer. The immune cell may be a T cell. The immune cell may be derived from the patient to be treated. The cleavage enzyme may be an MMP or ADAM family member. The cleavage enzyme may be MMP2, MMP9, MMP3, MMP14, ADAM17, ADAM28, or ADAM TS16.

[0097] In another aspect of the invention, the cleavage enzyme is administered directly to the patient, alone or concurrent with an agent for the treatment of cancer, including but not limited to chemotherapy agents, targeted biologicals, CAR T cells, BiTEs or ADCs. In one aspect, the cleavage enzyme is MMP1, MMP2, MMP3, MMP7, MMP8, MMP9, MMP11, MMP12, MMP13, MMP14, MMP16, ADAM9, ADAM10, ADAM17, ADAM 19, ADAMTS16, ADAM28 or a catalytically active fragment thereof. In another aspect, the cleavage enzyme is MMP9 or MMP14 and the other agent for the treatment of cancer is an anti-MUC1* CAR T cell. In yet another aspect, the cleavage enzyme is MMP9 or MMP14 and the other agent for the treatment of cancer is an anti-MUC16 CAR T cell.

[0098] In another aspect, the invention may be directed to an immune cell transfected or transduced with a CAR wherein its extra cellular domain comprises an antibody scFv that binds to the extra cellular domain of a MUC1 molecule that is devoid of the tandem repeats.

[0099] In another aspect, the invention may be directed to an immune cell transfected or transduced with a cleavage enzyme for the treatment of cancer. The cancer may be a MUC1 positive cancer. The immune cell may be a T cell. The immune cell may be an NK cell. The cleavage enzyme may be any enzyme that cleaves MUC1 such that the tandem repeat domain is separated from the transmembrane domain. Such cleavage enzymes include but are not limited to MMP1, MMP2, MMP3, MMP7, MMP8, MMP9, MMP11, MMP12, MMP13, MMP14, MMP16, ADAM9, ADAM10, ADAM17, ADAM 19, ADAMTS16, ADAM28 or a catalytically active fragment thereof. The immune cell may be further transfected or transduced with an activator of the cleavage enzyme. The cleavage enzyme may be without limitation, MMP2 or MMP9 or ADAM17, and the activator of cleavage enzymes MMP2 and MMP9 may be MMP14 and MMP3, respectively. The nucleic acid encoding the cleavage enzyme may be linked to an inducible promoter. The expression of the cleavage enzyme may be induced by an event that occurs specifically when the immune cell mounts an immune response to a target tumor cell. In one aspect of the invention, the cleavage enzyme cleaves MUC1 such that the cleavage product is recognized by an antibody that specifically recognizes cleaved MUC1 on cancerous tissues. In one aspect, the antibody that specifically recognizes cleaved MUC1 on cancerous tissues would bind to cancerous tissues at least two-times more than it binds to healthy tissues where T cells normally traffic.

[0100] In another aspect, the invention may be directed to an immune cell transfected or transduced with a CAR comprising an antibody fragment, and a cleavage enzyme for the treatment of cancer. The cancer may be a MUC1 positive cancer. The immune cell may be a T cell. The antibody fragment of the CAR on the T cell may direct the cell to a MUC1* positive tumor. The antibody fragment of the CAR on the T cell may recognize a form of MUC1 after it is cleaved by that specific cleavage enzyme. The antibody fragment of the CAR may be derived from MNC2 or MNE6 and the cleavage enzyme may be MMP9, MMP2, or ADAM17 or an activated form of MMP9, MMP2 or ADAM17. The immune cell may be further transfected or transduced with an activator of the cleavage enzyme. The cleavage enzyme maybe MMP2 or MMP9 or ADAM17, and an activator of cleavage enzymes MMP2 and MMP9 may be MMP14 and MMP3, respectively. The nucleic acid encoding the cleavage enzyme may be linked to an inducible promoter. The expression of the cleavage enzyme may be induced by an event that occurs specifically when the immune cell mounts an immune response to a target tumor cell. The antibody fragment may recognize a form of MUC1 or MUC1* that is created when the cleavage enzyme cleaves MUC1 or MUC1*. Expression of the cleavage enzyme by the inducible promoter may be induced when the antibody fragment of the CAR engages or binds to a MUC1 or MUC1* on the tumor.

[0101] In another aspect, the invention is directed to a method of treating cancer in a patient comprising administering to the patient the immune cell of any of the above, in combination with a checkpoint inhibitor.

[0102] It can also be appreciated that in any of the methods above, particularly in the methods of treating cancer, the MUC1 cleavage enzyme can be administered directly to the patient without necessarily being expressed from a nucleic acid construct.

[0103] In this regard, in one aspect, the present invention is directed to a method for treating a patient diagnosed with cancer comprising administering directly to the patient, a MUC1 cleavage enzyme, alone or concurrent with an agent for treating cancer. The agent may be a chemotherapy agent, targeted biological, CAR T cell, BiTE or antibody drug conjugate (ADC). The cleavage enzyme may be MMP1, MMP2, MMP3, MMP7, MMP8, MMP9, MMP11, MMP12, MMP13, MMP14, MMP16, ADAM9, ADAM10, ADAM17, ADAM 19, ADAMTS16, ADAM28 or a catalytically active fragment thereof. The agent may be an anti-MUC1* CAR T cell. In the CAR, the single chain antibody fragment may bind to a peptide comprising at least 12 contiguous amino acids of
[0104] (i) PSMGFR region of MUC1,
[0105] (ii) PSMGFR peptide,
[0106] (iii) a peptide having amino acid sequence SNIKFRPGSVVVQLTLAFREGTINVHDVETQFNQYKTEAASRY (SEQ ID NO:620);
[0107] (iv) a peptide having amino acid sequence of SVVVQLTLAFREGTINVHDVETQFNQYKTEAASRY (SEQ ID NO:621);
[0108] (v) a peptide having amino acid sequence of VQLTLAFREGTINVHDVETQFNQY (SEQ ID NO:622); or
[0109] (vi) a peptide having amino acid sequence of SNIKFRPGSVVVQLTLAFREGTIN (SEQ ID NO:623).

[0110] In the method above, any of the variable regions set forth in the following may be used:
[0111] (i) an anti-MUC1* extracellular domain antibody comprised of sequences of a humanized MN-E6 represented by humanized IgG2 heavy chain, or humanized IgG1 heavy chain, paired with humanized Kappa light chain, or humanized Lambda light chain;
[0112] (ii) an antibody of (i), wherein the humanized IgG2 heavy chain is SEQ ID NOS:53, humanized IgG1 heavy chain is SEQ ID NO:57, humanized Kappa light chain is SEQ ID NO:108, and humanized Lambda light chain is SEQ ID NO:112, or a sequence having 90%, 95% or 98% sequence identity thereof;
[0113] (iii) an anti-MUC1* extracellular domain antibody comprised of sequences of a humanized MN-C2 represented by humanized IgG1 heavy chain, humanized IgG2 heavy chain, paired with humanized Lambda light chain, and humanized Kappa light chain;
[0114] (iv) an antibody of (iii), wherein the humanized IgG1 heavy chain MN-C2 (SEQ ID NOS:159) or IgG2 heavy chain (SEQ ID NOS:164) paired with Lambda light chain (SEQ ID NO:219) or Kappa light chain (SEQ ID NO:213), or a sequence having 90%, 95% or 98% sequence identity thereof;
[0115] (v) an anti-MUC1* extracellular domain antibody comprised of sequences of a humanized MN-C3 represented by humanized IgG1 heavy chain or humanized IgG2 heavy chain paired with humanized Lambda light chain or humanized Kappa light chain;
[0116] (vi) an antibody of (v), wherein the humanized MN-C3 IgG1 heavy chain is SEQ ID NOS:454, IgG2 heavy chain is SEQ ID NOS:456, Lambda light chain is SEQ ID NO:501, and Kappa light chain is SEQ ID NO:503, or a sequence having 90%, 95% or 98% sequence identity thereof;
[0117] (vii) an anti-MUC1* extracellular domain antibody comprised of sequences of a humanized MN-C8 represented by humanized IgG1 heavy chain or humanized IgG2 heavy chain paired with humanized Lambda light chain or humanized Kappa light chain;
[0118] (viii) an antibody of (vii), wherein the humanized MN-C8 IgG1 heavy chain is SEQ ID NOS:540, IgG2 heavy chain is SEQ ID NOS:542, Lambda light chain is SEQ ID NO:580 and Kappa light chain is SEQ ID NO:582, or a sequence having 90%, 95% or 98% sequence identity thereof; or a combination thereof in the extracellular domain, a transmembrane region and a cytoplasmic tail that comprises sequence motifs that signal immune system activation.

[0119] In the method above, in the CAR, the extracellular domain may be comprised of humanized single chain antibody fragments of an MN-E6 scFv, MN-C2 scFv, MN-C3 scFv or MN-C8 scFv. The extracellular domain may be comprised of humanized single chain antibody fragments of an MN-E6 scFv set forth as SEQ ID NOS: 233, 235, or 237), MN-C2 scFv (SEQ ID NOS:239, 241, or 243), MN-C3 scFv (SEQ ID NOS: 245, 247, or 249) or MN-C8 scFv (SEQ ID NOS:251, 253, or 255). In the CAR, the cytoplasmic tail may be comprised of one or more of signaling sequence motifs CD3-zeta, CD27, CD28, 4-1BB, OX40, CD30, CD40, ICAm-1, LFA-1, ICOS, CD2, CD5, or CD7.

[0120] In the CAR above, its sequence may be CARMN-E6 CD3z (SEQ ID NOS:295), CARMN-E6 CD28/CD3z (SEQ ID NOS:298); CARMN-E6 4-1BB/CD3z (SEQ ID NOS:301); CARMN-E6 OX40/CD3z (SEQ ID NOS:617); CARMN-E6 CD28/4-1BB/CD3z (SEQ ID NOS:304); CARMN-E6 CD28/OX40/CD3z (SEQ ID NOS:619); CAR-MN-E6 Fc/4-1BB/CD3z (SEQ ID NOS:311), CAR-MN-E6 IgD/Fc/4-1BB/CD3z (SEQ ID NOS:771), CAR-MN-E6 FcH/4-1BB/CD3z (SEQ ID NOS:316), CAR-MN-E6 IgD/FcH/4-1BB/CD3z (SEQ ID NOS:773), CAR-MN-E6 IgD/4-1BB/CD3z (SEQ ID NOS:324), CAR-MN-E6 X4/4-1BB/CD3z (SEQ ID NOS:331), CAR MN-C2 CD3z (SEQ ID NOS:607); CAR MN-C2 CD28/CD3z (SEQ ID NOS:609); CAR MN-C2 4-1BB/CD3z (SEQ ID NOS:611); CAR MN-C2 OX40/CD3z (SEQ ID NOS:613); CAR MN-C2 CD28/4-1BB/CD3z (SEQ ID NOS:307); CAR MN-C2 CD28/OX40/CD3z (SEQ ID NOS:615), CAR44 huMNC2-CD8-4-1BB-CD3z (SEQ ID NOS:719), CAR-MN-C2 Fc/4-1BB/CD3z (SEQ ID NOS:733), CAR-MN-C2 IgD/Fc/4-1BB/CD3z (SEQ ID NOS:735), CAR-MN-C2 FcH/4-1BB/CD3z (SEQ ID NOS:737), CAR-MN-C2 IgD/FcH/4-1BB/CD3z (SEQ ID NOS:739), CAR-MN-C2 IgD/4-1BB/CD3z (SEQ ID NOS:741), CAR-MN-C2 X4/4-1BB/CD3z (SEQ ID NOS:743).

[0121] The above method may comprise a cell comprising a CAR with an extracellular domain that binds to MUC1* transfected or transduced cell. The cell may including the CAR may be an immune system cell. The immune system cell may be T cell, NK cell, dendritic cell or mast cell.

[0122] In the method above, the agent may be an anti-MUC16 CAR T cell.

[0123] The method above may include at least two CARs with different extracellular domain units transfected into the same cell. One of the extracellular domain recognition units may bind to MUC1* extracellular domain. One of the extracellular domain recognition units may bind to PD-1. One of the extracellular domain recognition units may be an antibody fragment and the other may be a peptide or an anti-MUC1* antibody fragment.

[0124] The method may include an immune cell transfected or transduced with a plasmid encoding a CAR and a plasmid encoding a non-CAR species that is expressed from an inducible promoter. The non-CAR species may be expressed from an inducible promoter that is activated by elements of an activated immune cell. The non-CAR species may be expressed from an NFAT inducible promoter. The NFAT may be NFATc1, NFATc3 or NFATc2. The cleavage enzyme may be MMP2, MMP3, MMP9, MMP13, MMP14, MMP16, ADAM10, ADAM17, or ADAM28, or a catalytically active fragment thereof. The non-CAR species may be a cytokine. The cytokine may be IL-7, IL-12, IL-15 or IL-18.

[0125] These and other objects of the invention will be more fully understood from the following description of the invention, the referenced drawings attached hereto and the claims appended hereto.

### BRIEF DESCRIPTION OF THE DRAWINGS

[0126] The present invention will become more fully understood from the detailed description given herein below, and the accompanying drawings which are given by way of illustration only, and thus are not limitative of the present invention, and wherein;

[0127] FIG. 1 shows cell growth assay graphs of MUC1* positive cells treated with either bivalent ‘bv’ anti-MUC1* antibody, monovalent ‘mv’ or Fab, NM23-H1 dimers or NME7-AB. Bivalent anti-MUC1* antibodies stimulate growth of cancer cells whereas the monovalent Fab inhibits growth (A, B). Classic bell-shaped curve indicates ligand induced dimerization stimulates growth. Dimeric NM23-H1, aka NME1, stimulates growth of MUC1* positive cancer cells but siRNA to suppress MUC1 expression eliminate its effect (C). NME7-AB also stimulates the growth of MUC1* positive cells (D).

[0128] FIG. 2 shows results of ELISA assays. MUC1* peptides PSMGFR, PSMGFR minus 10 amino acids from the N-terminus aka N-10, or PSMGFR minus 10 amino acids from the C-terminus, aka C-10 are immobilized on the plate and the following are assayed for binding: NME7-AB (A), MN-C2 monoclonal antibody (B), MN-E6 monoclonal antibody (C), or dimeric NME1 (D). These assays show that NME1, NME7-AB and monoclonal antibodies MN-C2 and MN-E6 all require the first membrane proximal 10 amino acids of the MUC1* extracellular domain to bind. MUC1* peptides PSMGFR minus 10 amino acids from the N-terminus aka N-10, or PSMGFR minus 10 amino acids from the C-terminus, aka C-10, are immobilized on the plate and the following are assayed for binding: MN-C3 (E) and MN-C8 (F).

[0129] FIG. 3 shows results of competitive ELISA assays. The PSMGFR MUC1* peptide is immobilized on the plate and dimeric NM23-H1, aka NME1, is added either alone or after the MN-E6 antibody has been added (A). The same experiment was performed wherein NM23-H7, NME7-AB, is added alone or after MN-E6 has been added (B). Results show that MN-E6 competitively inhibits the binding of MUC1* activating ligands NME1 and NME7. In a similar experiment (C), PSMGFR or PSMGFR minus 10 amino acids from the N-terminus, aka N-10, is immobilized on the plate. Dimeric NM23-H1 is then added. Anti-MUC1* antibodies MN-E6, MN-C2, MN-C3 or MN-C8 are then tested for their ability to compete off the NM23-H1. Results show that although all three antibodies bind to the PSMGFR peptides, MN-E6 and MN-C2 competitively inhibit binding of the MUC1* activating ligands.

[0130] FIG. 4 shows FACS scans of anti-MUC1* antibodies binding specifically to MUC1* positive cancer cells and MUC1* transfected cells but not MUC1* or MUC1 negative cells. ZR-75-1, aka 1500, MUC1* positive breast cancer cells were stained with 1:2 or 1:10 dilutions of the 1.5 ug/ml humanized MN-C2. After two washes, cells were stained with secondary antibody, Anti-Penta-His antibody at conjugated to Alexa 488 (Qiagen) dilutions of 1:200 (A), 1:50 (B), or 1:10 (C) to detect the 6×His tag on the huMN-C2 scFv. Flow cytometric analysis revealed a concentration-dependent shift of a subset of cells, indicating specific binding, which is unseen in the absence of the MN-C2 scFv (A-C). In another case, MN-E6 was used to stain MUC1 negative HCT-116 colon cancer cells transfected with the empty vector, single cell clone #8 (D), HCT-116 colon cancer cells transfected with MUC1* single cell clone #10 (E), or ZR-75-1, aka 1500, MUC1* positive breast cancer cells (F). As the FACS scans show, both MN-C2 and MN-E6 only stain MUC1* positive cells and not MUC1 or MUC1* negative cells.

[0131] FIG. 5 shows a graph of an ELISA in which surface is coated with either the MUC1* PSMGFR peptide or a control peptide. Humanized MN-C2 scFv is then incubated with the surface, washed and detected according to standard methods. The ELISA shows that the huMN-C2 scFv binds to the MUC1* peptide with an EC-50 of about 333 nM.

[0132] FIG. 6 shows graphs of cancer cell growth inhibition by MUC1* antibody variable region fragment humanized MN-C2 scFv. hMN-C2 scFv potently inhibited the growth of ZR-75-1, aka 1500, MUC1* positive breast cancer cells (A) and T47D MUC1* positive breast cancer cells (B) with approximately the same EC-50 as the in vitro ELISAs.

[0133] FIG. 7 shows graphs of tumor growth in immune compromised mice that have been implanted with human tumors then treated with anti-MUC1* antibody MN-E6 Fab or mock treatment. Female nu/nu mice implanted with 90-day estrogen pellets were implanted with 6 million T47D human breast cancer cells that had been mixed 50/50 with Matrigel. Mice bearing tumors that were at least 150 mm³ and had three successive increases in tumor volume were selected for treatment. Animals were injected sub cutaneously twice per week with 80 mg/kg MN-E6 Fab and an equal number of mice fitting the same selection criteria were injected with vehicle alone (A). Male NOD/SCID mice were implanted with 6 million DU-145 human prostate cancer cells that had been mixed 50/50 with Matrigel. Mice bearing tumors that were at least 150 mm³ and had three successive increases in tumor volume were selected for treatment. Animals were injected sub-cutaneously every 48 hours with 160 mg/kg MN-E6 Fab and an equal number of mice fitting the same selection criteria were injected with vehicle alone (B). Tumors were measured independently by two researchers twice per week and recorded. Statistics were blindly calculated by independent statistician, giving a P value of 0.0001 for each. Anti-MUC1* Fab inhibited breast cancer growth and prostate cancer growth. Treatment had no effect on weight, bone marrow cell type or number.

[0134] FIG. 8 is a graph of an ELISA assay showing differing levels of expression of humanized MN-E6 anti-MUC1* antibody depending on whether the light chain was kappa or lambda and whether the variable portion was fused to a human IgG1 or IgG2.

[0135] FIG. 9 is a graph of an ELISA assay comparing the binding of the parent mouse MN-E6 antibody to the humanized versions of the MN-E6 antibody to a surface presenting the PSMGFR peptide derived from the MUC1* extracellular domain.

[0136] FIG. 10 is a graph of an ELISA assay showing differing levels of expression of humanized MN-C2 anti-MUC1* antibody depending on whether the light chain was kappa or lambda and whether the variable portion was fused to a human IgG1 or IgG2.

[0137] FIG. 11 is a graph of an ELISA assay comparing the binding of the parent mouse MN-C2 antibody to the humanized versions of the MN-C2 antibody to a surface presenting the PSMGFR peptide derived from the MUC1* extracellular domain.

[0138] FIG. 12 is a graph of an ELISA assay showing binding of humanized single chain (scFv) MN-C2 and MN-E6 antibodies binding to a surface presenting the PSMGFR peptide derived from the MUC1* extracellular domain.

[0139] FIG. 13 shows FPLC traces of the purification of MN-E6 scFv-Fc fusion protein that was grown in low IgG FBS over a Protein A affinity column. A) is the trace of the flow through. B) is the trace of the elution. C) shows the purified protein on a reducing or non-reducing gel.

[0140] FIG. 14 shows photographs of SDS-PAGE characterization of purified MN-E6 scFv-Fc fusion proteins on a non-reducing gels, wherein the Fc portion that was fused to the MN-E6 was either wild type (wt) or mutated as follows: A) F405Q, Y407R, T394D; B) T366W/L368W, T364R/L368R, T366W/L368W or T364R/L368R. Fc mutants F405Q, Y407R, T366W/L368W, T364R/L368R, T366W/L368W and T364R/L368R all favored monomer over dimer formation. The reference construct amino acid sequence for the indicated mutations is SEQ ID NO:273.

[0141] FIG. 15 shows FPLC traces of the purification of MN-E6 scFv-Fc Y407Q fusion protein that was grown in low IgG FBS over a Protein A affinity column. A) is the trace of the flow through. B) is the trace of the elution. The protein was further purified by size exclusion over an S200 column (C). D) is a photograph of an SDS-PAGE gel showing which fractions had a predominance of monomer. The reference construct amino acid sequence for the indicated mutations is SEQ ID NO:273.

[0142] FIG. 16 shows a photograph of SDS-PAGE characterization of purified MN-E6 scFv-Fc-mutant fusion proteins on a non-reducing gel, wherein the Fc portion that was fused to the MN-E6 scFv was either wild type (wt) or mutated by elimination of the hinge region, ‘DHinge’, of the Fc or elimination of the hinge region of the Fc and also bearing the Y407R mutation. All the Fc mutants favored monomer over dimer formation. The reference construct amino acid sequence for the indicated mutations is SEQ ID NO:273.

[0143] FIG. 17. A and B show photograph of non-reducing SDS-PAGE characterization of large scale expression and purification of MN-E6 scFv-Fc hingeless mutant, showing that it is a monomer. FPLC characterization and purification of MN-E6 scFv-Fc hingeless mutant is shown (C).

[0144] FIG. 18 shows photographs of the SDS-PAGE characterization of the purified MN-C3 scFv-Fc fusion protein on a non-reducing gel (A) or a reducing gel (B). The protein was purified by size exclusion. The FPLC trace is shown (C).

[0145] FIG. 19 shows photographs of Native gels of MN-C3 or MN-E6 Fabs, scFv, scFv-Fc, wherein the Fc portion is wild type or mutants that prefer or are exclusively monomers. Native gels show that the Y407R Fc mutation (A) and the double mutant Y407R and a deleted hinge (B) favor monomer over dimer the best. Note that proteins are loaded onto a gel at much higher concentrations than typical use concentrations. The dimer formation of other Fc mutants may only reflect the fact that loading concentration is very high.

[0146] FIG. 20 shows a graph of an ELISA wherein the surface was immobilized with either PSMGFR peptide, PSMGFR minus 10 amino acids from the N-terminus or minus 10 amino acids from the C-terminus. The hu MN-E6 scFv-Fc bound to the PSMGFR peptide and to the PSMGFR N-10 peptide but not to the PSMGFR C-10 peptide. The parent MN-E6 antibody and the humanized MN-E6 require the C-terminal 10 amino acids of PSMGFR for binding.

[0147] FIG. 21 shows an ELISA graph of several anti-MUC1* scFv-Fc fusion proteins wherein the Fc region has been eliminated or mutated. Shown are hu MN-E6 scFv-Fc-wt, hu MN-E6 scFv-Fc-Y407R, hu MN-E6 scFv-Fc-hingeless, and hu MN-E6 scFv-Fc-Y407R-hingeless. All mutants bind to the PSMGFR peptide of the MUC1* extracellular domain (A). An ELISA graph of several anti-MUC1* scFv-Fc fusion proteins wherein the Fc region is either wild type or mutated. Shown are hu MN-E6 scFv-Fc-wt, hu MN-E6 scFv-Fc-hingeless, and hu MN-C3 scFv-Fc is shown (B). All bind to the PSMGFR peptide of the MUC1* extracellular domain.

[0148] FIG. 22 shows graphs of ELISAs wherein the assay plate surface was immobilized with either PSMGFR peptide, PSMGFR minus 10 amino acids from the N-terminus or minus 10 amino acids from the C-terminus. The MN-C3 antibody variants were then assayed for binding to the various MUC1* peptides. A) Purified mouse monoclonal MN-C3 antibody; B) Impure humanized MN-C3 antibody; and C) the humanized MN-C3 scFv-Fc. ELISAs show binding to the PSMGFR peptide as well as to certain deletion peptides.

[0149] FIG. 23 shows a graph of an ELISA assay that quantifies the binding of humanized MN-E6 scFv-Fc-delta hinge, aka Dhinge or hingeless, and humanized MN-E6 scFv to the MUC1* peptide PSMGFR.

[0150] FIG. 24 shows photographs of immunofluorescence experiments in which humanized MN-C2 scFv or MN-E6 scFv specifically binds to MUC1* positive breast cancer cells in an identical concentration dependent manner. A-G: hu MN-C2 scFv binding to T47D breast cancer cells at concentrations indicated. H-N shows the fluorescently labeled scFv and DAPI. O-U: hu MN-E6 scFv binding to T47D breast cancer cells at concentrations indicated. V-B′ shows the fluorescently labeled scFv and DAPI. C′ is the secondary antibody control.

[0151] FIG. 25 shows photographs of 1500 MUC1* positive breast cancer cells that have been cultured in normal medium or in the presence of humanized MN-E6 scFv. A-D are bright field images taken at 4× magnification. E-H are calcein fluorescent images taken at 4× magnification. I-L are calcein fluorescent images taken at 10× magnification. A, E, I show control cells cultured in normal RPMI medium. B, F, J show control cells cultured in normal RPMI medium plus a volume of PBS equal to the volume of MN-E6 scFv in PBS that is added to experimental wells. C, G, K show cells cultured in normal RPMI medium plus 500 ug/mL MN-E6 scFv. D, H, L show cells cultured in normal RPMI medium plus 5 ug/mL MN-E6 scFv. The photographs show killing and/or growth inhibition of MUC1* positive cells by MN-E6 scFv at 5 ug/mL and an even greater effect at 500 ug/mL. Images were taken at 96 hours post addition of test molecule.

[0152] FIG. 26 shows photographs of 1500 MUC1* positive breast cancer cells that have been cultured in normal medium or in the presence of humanized MN-E6 scFv-Fc Dhinge, which is a hingeless or delta hinge mutant. A-F are bright field images taken at 20× magnification. G-L are calcein fluorescent images taken at 4× magnification. A, G show control cells cultured in normal RPMI medium. B, H show cells cultured in normal RPMI medium plus 100 ug/mL hMN-E6 scFv-Fc Dhinge. C, I show cells cultured in normal RPMI medium plus 50 ug/mL hMN-E6 scFv-Fc Dhinge. D, J show cells cultured in normal RPMI medium plus 5 ug/mL hMN-E6 scFv-Fc Dhinge. E, K show cells cultured in normal RPMI medium plus 0.5 ug/mL hMN-E6 scFv-Fc Dhinge. F, L show cells cultured in normal RPMI medium plus 500 ug/mL of MN-E6 Fab. The photographs show killing and/or growth inhibition of MUC1* positive cells by hMN-E6 scFv-Fc Dhinge 5 ug/mL, an even greater effect at 50 μg/mL and yet an even greater effect at 100 ug/mL. Comparing cell morphology to the control cells, cancer cells grown in MN-E6 Fab or in an effective amount of hMN-E6 scFv-Fc Dhinge, show rounding up of the cells which morphology change occurs before cell death. Images were taken at 96 hours post addition of test molecule.

[0153] FIG. 27 shows a graph of the image analysis of the fluorescent images of FIGS. 25 and 26. Image J was used to quantify the number of cells remaining after 96 hours treatment in humanized MN-E6scFv or MN-E6 scFv-Fc-delta hinge, aka Dhinge. The analysis software uses pixel counting and pixel fluorescence intensity to quantify the number of cells in each photograph. Analysis was performed over the entire image 512×512 pixels, 8-bit image. For comparison, the inhibition of mouse monoclonal MN-E6 Fab is also analyzed.

[0154] FIG. 28 shows schematics of CAR sequence components. A: CARI; B: CARII; C: CARIII.

[0155] FIG. 29 is a graph of an experiment measuring IL-2 cytokine secretion by Jurkat T cells that were transduced with a panel of CARS, including MN-E6-CD8-3z, MN-E6-CD8-CD28-3z, MN-E6-CD8-41BB-3z, MN-E6-CD4-CD28-3z and MN-E6-CD4-CD28-41BB-3z, when the CAR T cells were exposed to K562-wt cells or K562 cells that had been transfected with MUC1*.

[0156] FIG. 30 is a graph of an experiment measuring IL-2 cytokine secretion by Jurkat T cells that were transduced with a panel of CARs, including MN-E6-CD8-CD28-3z, MN-E6-CD8-41BB-3z, MN-E6-CD4-CD28-3z and MN-E6-CD4-41BB-3z, when the CAR T cells were exposed to K562-wt cells or K562 cells that had been transfected with MUC1*

[0157] FIG. 31 is a graph of an experiment measuring IL-2 cytokine secretion by primary human T cells, isolated from a blood sample, that were transduced with a panel of CARs, including MN-E6-CD8-CD28-3z, MN-E6-CD8-41BB-3z and MN-E6-CD4-41BB-3z, when the CAR T cells were exposed to K562-wt cells or K562 cells that had been transfected with MUC1*.

[0158] FIG. 32 is a graph of an experiment measuring interferon-gamma (IFN-g) cytokine secretion by primary human T cells, isolated from a blood sample, that were transduced with a panel of CARs, including MN-E6-CD8-CD28-3z and MN-E6-CD4-41BB-3z, when the CAR T cells were exposed to K562-wt cells or K562 cells that had been transfected with MUC1*.

[0159] FIG. 33 is a graph of an experiment measuring interferon-gamma (IFN-g) cytokine secretion by primary human T cells, isolated from a blood sample, that were transduced with a panel of CARs, including MN-E6-CD8-CD28-3z, MN-E6-CD8-41BB-3z and MN-E6-CD8-CD28-41BB-3z, when the CAR T cells were exposed to K562-wt cells, K562 cells that had been transfected with MUC1*, or MUC1* positive cancer cells of prostate cancer, breast cancer or pancreatic cancer.

[0160] FIG. 34 is a graph of an experiment measuring target cell death when primary human T cells, isolated from a blood sample, that were transduced with a panel of CARs, including MN-E6-CD8-CD28-3z, MN-E6-CD8-41BB-3z and MN-E6-CD4-41BB-3z, when the CAR T cells were exposed to K562-wt cells or K562 cells that had been transfected with MUC1*. The ratio of T cells to target cells was 1:1 and the cells were co-cultured for 24 hours.

[0161] FIG. 35 is a graph of FACS measuring a time course of target cell survival from Day 1 to Day 3. Primary human T cells, isolated from a blood sample, were transduced with a panel of CARs, including humanized MN-E6-CD8-3z, MN-E6-CD8-CD28-3z, MN-E6-CD8-41BB-3z and MN-E6-CD8-CD28-41BB-3z. The CAR T cells were then exposed to K562-wt cells that naturally express low levels of MUC1*, or K562 cells that had been transfected with MUC1* high. The ratio of MUC1* targeting CAR T cells to target cells was either 1:1, 10:1, or 20:1. Surviving cells were detected and measured at Day 1 or Day 3.

[0162] FIG. 36 is a graph of FACS measurements of target cell survival at Day 3 of co-culture experiment. Primary human T cells were transduced with a panel of CARs, including humanized MN-E6-CD8-3z, MN-E6-CD8-CD28-3z, MN-E6-CD8-41BB-3z and MN-E6-CD8-CD28-41BB-3z. The CAR T cells were then exposed to MUC1* positive T47D breast cancer cells or MUC1* positive 1500 aka ZR-75-1 breast cancer cells. The ratio of MUC1* targeting CAR T cells to target cells was either 1:1 or 10:1. As can be seen from the graph, T cells transduced with a MUC1* targeting CAR have a much greater killing effect on MUC1* cancer cells than the untransduced control T cells. In addition, the killing effect is much greater when the ratio of T cells: target cells is increased.

[0163] FIG. 37 is a graph of FACS measurements of target cell survival at Day 1 of co-culture experiment. Primary human T cells were transduced with a panel of CARs, including humanized MN-E6-CD8-41BB-3z, MN-E6-CD4-41BB-3z, and MN-E6-CD8-CD28-41BB-3z. The CAR T cells were then exposed to the following MUC1* positive cancer cells: T47D breast cancer; capan2 pancreatic cancer; or DU-145 prostate cancer. The ratio of MUC1* targeting CAR T cells to target cells was 5:1. As can be seen from the graph, T cells transduced with a MUC1* targeting CAR have a much greater killing effect on MUC1* cancer cells than the untransduced control T cells. Note that the measurements were taken after 24 hours with only a 5:1 T cell to target cell ratio. Also note that MUC1* targeting CARs that have a CD4 extracellular domain-transmembrane-cytoplasmic tail work equally well as CD8 constructs.

[0164] FIG. 38 is a graph of FACS measurements of target cell survival at Day 3 of co-culture experiment. Primary human T cells were transduced with a panel of CARs, including humanized MN-E6-CD8-41BB-3z, MN-E6-CD4-41BB-3z, and MN-E6-CD8-CD28-41BB-3z. The CAR T cells were then exposed to the following MUC1* positive cancer cells: K562 leukemia cells transfected with MUC1*; T47D breast cancer; 1500 aka ZR-75-1 breast cancer cells; or CAPAN-2 pancreatic cancer cells. In addition to the untransduced T cell controls, the assay was performed on PC3 MUC1* negative prostate cancer cells. The ratio of MUC1* targeting CAR T cells to target cells was 1:1. As can be seen from the graph, T cells transduced with a MUC1* targeting CAR have a much greater killing effect on MUC1* cancer cells than the untransduced control T cells. In addition, the killing effect is specific for MUC1* positive cells. Note that MUC1* targeting CARs that have a CD4 extracellular domain-transmembrane-cytoplasmic tail work equally well as CD8 constructs.

[0165] FIG. 39 is a graph of FACS measurements of CAR T cell expansion over 24 hours in co-culture with target cells at a ratio of 5:1 CAR T cells to target cells. The primary human T cells were transduced with a panel of CARs, including humanized MN-E6-CD8-41BB-3z, MN-E6-CD4-41BB-3z, and MN-E6-CD8-CD28-41BB-3z. The CAR T cells were co-cultured with MUC1* positive T47D breast cancer cells, MUC1* positive Capan pancreatic cancer cells, and MUC1-negative cells HCT-116 colon cancer cells and HEK-293 human embryonic kidney cells. As can be seen from the graph, the CAR T population is increased in the presence of MUC1* positive cells.

[0166] FIG. 40 shows a photograph of a Western blot of MUC1* targeting CARs. From 1 to 9 are:
[0167] 1. E6scFv-Fc-8-41BB-CD3z (Human Fc as hinge region with CD8 TM);
[0168] 2: E6scFv-FcH-8-41BB-CD3z (Human Fc hingeless as hinge region with CD8 TM)
[0169] 3: E6scFv-Fc-4-41BB-CD3z (Human Fc as hinge region with CD4 TM)
[0170] 4: E6scFv-FcH-4-41BB-CD3z (Human Fc as hingeless hinge region with CD4 TM)
[0171] 5: E6scFv-IgD-8-41BB-CD3z (hinge region from human IgD with CD8 TM)
[0172] 6: E6scFv-IgD-4-41BB-CD3z (hinge region from human IgD with CD4 TM)
[0173] 7: E6scFv-X4-8-41BB-CD3z (Long flexible linker as hinge region with CD8 TM)
[0174] 8: E6scFv-X4-4-41BB-CD3z (Long flexible linker as hinge region with CD4 TM)
[0175] 9: E6scFv-8-4-41BB-CD3z (Hinge region from CD8 and CD4 a with CD4 TM).

[0176] FIG. 41 shows graphs of FACS scans of T47D breast cancer cells co-cultured with human T cells that were transduced with MN-E6scFv-Fc-8-41BB-CD3z, MN-E6scFv-FcH-8-41BB-CD3z, MN-E6scFv-Fc-4-41BB-CD3z, MN-E6scFv-IgD-8-41BB-CD3z, MN-E6scFv-X4-8-41BB-CD3z and MN-E6scFv-X4-4-41BB-CD3z. T cells and cancer cells were co-cultured at a 1:1 ratio for 48 hours. T cell counts were normalized to an average of all untransduced T cells and target cells were normalized to each specific cell type when co-cultured with untransduced T cells. The graph shows that when the CAR T cells are co-cultured with MUC1* positive cancer cells, the T cell population expands and the targeted cancer cell population decreases.

[0177] FIG. 42 shows graphs of FACS scans of T47D breast cancer cells, Capan-2 pancreatic cancer cells, K562-MUC1* transfected cells, and K562-wt cells that were co-cultured with human T cells that were transduced with MN-E6scFv-Fc-8-41BB-CD3z, MN-E6scFv-FcH-8-41BB-CD3z, MN-E6scFv-Fc-4-41BB-CD3z, MN-E6scFv-IgD-8-41BB-CD3z, MN-E6scFv-X4-8-41BB-CD3z and MN-E6scFv-X4-4-41BB-CD3z. T cells and cancer cells were co-cultured at a 1:1 ratio for 48 hours. T cell counts were normalized to an average of all untransduced T cells and target cells were normalized to each specific cell type when co-cultured with untransduced T cells. The graph shows that when the CAR T cells are co-cultured with MUC1* positive cancer cells, the T cell population expands and the targeted cancer cell population decreases.

[0178] FIG. 43. A, B are photographs of breast cancer tissue arrays. A) was stained with VU4H5 which recognizes MUC1-FL (full length); B) was stained with mouse monoclonal antibody MN-C2 which recognizes cancerous MUC1*. Following automated staining (Clarient Diagnostics), the tissue staining was scored using Allred scoring method which combines an intensity score and a distribution score. C, D, E, F are color coded graphs showing the score calculated for MUC1 full-length staining for each patient's tissue. G, H, I, J are color coded graphs showing the score calculated for MUC1* staining for each patient's tissue.

[0179] FIG. 44. A, B are photographs of breast cancer tissue arrays. A) was stained with VU4H5 which recognizes MUC1-FL (full length); B) was stained with mouse monoclonal antibody MN-C2 which recognizes cancerous MUC1*. Following automated staining (Clarient Diagnostics), the tissue staining was scored using Allred scoring method which combines an intensity score and a distribution score. C, D, E, F are color coded graphs showing the score calculated for MUC1 full-length staining for each patient's tissue. G, H, I, J are color coded graphs showing the score calculated for MUC1* staining for each patient's tissue.

[0180] FIG. 45 shows photographs of normal breast and breast cancer tissues stained with humanized MN-E6-scFv-Fc biotinylated anti-MUC1* antibody at 2.5 ug/mL, then stained with a secondary streptavidin HRP antibody. A) is a normal breast tissue. B-D are breast cancer tissues from patients as denoted in the figure. E-H are photographs of the corresponding serial sections that were stained with the secondary antibody alone.

[0181] FIG. 46 shows photographs of normal breast and breast cancer tissues stained with humanized MN-E6-scFv-Fc biotinylated anti-MUC1* antibody at 2.5 ug/mL, then stained with a secondary streptavidin HRP antibody. A) is a normal breast tissue. B-C are breast cancer tissues from patients as denoted in the figure. D-F are photographs of the corresponding serial sections that were stained with the secondary antibody alone.

[0182] FIG. 47 shows photographs of breast cancer tissues stained with MN-E6 anti-MUC1* antibody at 10 ug/mL, then stained with a rabbit anti mouse secondary HRP antibody. A-D are breast cancer tissues from patient #300. E-H are breast cancer tissues from metastatic patient #291.

[0183] FIG. 48 shows photographs of normal lung and lung cancer tissues stained with humanized MN-E6-scFv-Fc biotinylated anti-MUC1* antibody at 2.5 ug/mL, then stained with a secondary streptavidin HRP antibody. A) is a normal lung tissue. B, C are lung cancer tissues from patients as denoted in the figure. D-F are photographs of the corresponding serial sections that were stained with the secondary antibody alone.

[0184] FIG. 49 shows photographs of normal lung and lung cancer tissues stained with humanized MN-E6-scFv-Fc biotinylated anti-MUC1* antibody at 2.5 ug/mL, then stained with a secondary streptavidin HRP antibody. A) is a normal lung tissue. B, C are lung cancer tissues from patients as denoted in the figure. D-F are photographs of the corresponding serial sections that were stained with the secondary antibody alone.

[0185] FIG. 50 shows photographs of normal lung and lung cancer tissues stained with humanized MN-E6-scFv-Fc biotinylated anti-MUC1* antibody at 25 ug/mL, then stained with a secondary streptavidin HRP antibody. A) is a normal lung tissue. B, C are lung cancer tissues from patients as denoted in the figure. D-F are photographs of the corresponding serial sections that were stained with the secondary antibody alone.

[0186] FIG. 51 shows photographs of normal lung and lung cancer tissues stained with humanized MN-E6-scFv-Fc biotinylated anti-MUC1* antibody at 25 ug/mL, then stained with a secondary streptavidin HRP antibody. A) is a normal lung tissue. B, C are lung cancer tissues from patients as denoted in the figure. D-F are photographs of the corresponding serial sections that were stained with the secondary antibody alone.

[0187] FIG. 52 shows photographs of normal small intestine and cancerous small intestine tissues stained with humanized MN-E6-scFv-Fc biotinylated anti-MUC1* antibody at 5 ug/mL, then stained with a secondary streptavidin HRP antibody. A) is a normal small intestine tissue. B) is small intestine cancer from patient as denoted in the figure. C, D are photographs of the corresponding serial sections that were stained with the secondary antibody alone.

[0188] FIG. 53 shows photographs of normal small intestine tissues stained with humanized MN-E6-scFv-Fc anti-MUC1* antibody at 50 μg/mL, then stained with a secondary goat-anti-human HRP antibody. A-D are normal small intestine tissue. E-H are photographs of the corresponding serial sections that were stained with the secondary antibody alone.

[0189] FIG. 54 shows photographs of cancerous small intestine tissues stained with humanized MN-E6-scFv-Fc anti-MUC1* antibody at 50 μg/mL, then stained with a secondary goat-anti-human HRP antibody. A-D are cancerous small intestine tissue from a patient as denoted in figure. E-H are photographs of the corresponding serial sections that were stained with the secondary antibody alone.

[0190] FIG. 55 shows photographs of cancerous small intestine tissues stained with humanized MN-E6-scFv-Fc anti-MUC1* antibody at 50 μg/mL, then stained with a secondary goat-anti-human HRP antibody. A-D are cancerous small intestine tissue from a patient as denoted in figure. E-H are photographs of the corresponding serial sections that were stained with the secondary antibody alone.

[0191] FIG. 56 shows photographs of normal colon tissues stained with humanized MN-E6-scFv-Fc anti-MUC1* antibody at 50 μg/mL, then stained with a secondary goat-anti-human HRP antibody. A-D are normal colon. E-H are photographs of the corresponding serial sections that were stained with the secondary antibody alone.

[0192] FIG. 57 shows photographs of colon cancer tissues stained with humanized MN-E6-scFv-Fc anti-MUC1* antibody at 50 μg/mL, then stained with a secondary goat-anti-human HRP antibody. A-D are colon cancer tissue from a metastatic patient as denoted in figure. E-H are photographs of the corresponding serial sections that were stained with the secondary antibody alone.

[0193] FIG. 58 shows photographs of colon cancer tissues stained with humanized MN-E6-scFv-Fc anti-MUC1* antibody at 50 μg/mL, then stained with a secondary goat-anti-human HRP antibody. A-D are colon cancer tissue from a Grade 2 patient as denoted in figure. E-H are photographs of the corresponding serial sections that were stained with the secondary antibody alone.

[0194] FIG. 59 shows photographs of colon cancer tissues stained with humanized MN-E6-scFv-Fc anti-MUC1* antibody at 50 μg/mL, then stained with a secondary goat-anti-human HRP antibody. A-D are colon cancer tissue from a metastatic patient as denoted in figure. E-H are photographs of the corresponding serial sections that were stained with the secondary antibody alone.

[0195] FIG. 60 shows photographs of prostate cancer tissues stained with humanized MN-E6-scFv-Fc anti-MUC1* antibody at 50 μg/mL, then stained with a secondary goat-anti-human HRP antibody. A-D are prostate cancer tissue from a patient as denoted in figure. E-H are photographs of the corresponding serial sections that were stained with the secondary antibody alone.

[0196] FIG. 61 shows photographs of prostate cancer tissues stained with humanized MN-E6-scFv-Fc anti-MUC1* antibody at 50 μg/mL, then stained with a secondary goat-anti-human HRP antibody. A-D are prostate cancer tissue from a patient as denoted in figure. E-H are photographs of the corresponding serial sections that were stained with the secondary antibody alone.

[0197] FIG. 62 shows photographs of prostate cancer tissues stained with humanized MN-E6-scFv-Fc anti-MUC1* antibody at 50 μg/mL, then stained with a secondary goat-anti-human HRP antibody. A-D are prostate cancer tissue from a patient as denoted in figure. E-H are photographs of the corresponding serial sections that were stained with the secondary antibody alone.

[0198] FIGS. 63A-63B show fluorescence activated cell sorting (FACS) measurements of human CD34+ bone marrow cells stained with anti-MUC1* monoclonal antibodies MNC3 or MNE6 or an isotype control antibody. The histogram of the FACS assay (FIG. 63B) and the bar graph showing the data (FIG. 63A) show that the MUC1* positive cells of the bone marrow are recognized by one anti-MUC1* antibody, MNC3 but not by another MNE6.

[0199] FIGS. 64A-64H show photographs of DU145 prostate cancer cells (FIGS. 64A-64D) or T47D breast cancer cells (FIGS. 64E-64H) that have been treated with either the Fab of anti-MUC1* antibody MNC2 (FIG. 64A), MNE6 (FIG. 64B, 64F-64H), MNC3 (FIG. 64C) or MNC8 (FIG. 64D). The images show that cancer specific antibodies MNC2 and MNE6 effectively kill prostate and breast cancer cells while the monoclonal antibodies MNC3 and MNC8 do not.

[0200] FIG. 65 shows a graph of a PCR experiment comparing expression of a wide range of cleavage enzymes expressed in different cells lines, wherein the values have been normalized to those expressed in breast cancer cell line T47D. Cell lines that are compared are prostate cancer cell line DU145, HCT-MUC1-41TR that is a MUC1 negative colon cancer cell line transfected with a MUC1 whose extracellular domain is truncated after 41 tandem repeat units and that is not cleaved to the MUC1* form, T47D breast cancer cell line and CD34+ bone marrow cells.

[0201] FIG. 66 shows the graph of the PCR experiment of FIG. 65 but with the Y-axis maximum set to 5.

[0202] FIGS. 67A-67B show a graph of a FACS experiment wherein the effect of a panel of cleavage enzyme inhibitors is assessed for breast cancer cell line T47D. FIG. 67A shows the percentage of cells that test positive for full-length MUC1 antibody VU4H5 or for anti-MUC1* monoclonal antibody MNC2. FIG. 67B shows the mean fluorescence intensity of cells probed with antibody VU4H5 versus MNC2. As can be seen, TAPI-1 inhibitor and MMP2/9 V inhibitor inhibited cleavage of MUC1.

[0203] FIGS. 68A-68B show graphs of a FACS experiment wherein the effect of a panel of cleavage enzyme inhibitors is assessed for prostate cancer cell line DU145. FIG. 68A shows the percentage of cells that test positive for full-length MUC1 antibody VU4H5 or for anti-MUC1* monoclonal antibody MNC2. FIG. 68B shows the mean fluorescence intensity of cells probed with antibody VU4H5 versus MNC2. As can be seen, none of the cleavage enzyme inhibitors had an effect on MUC1 cleavage.

[0204] FIGS. 69A-69B show photographs of serial sections of a breast cancer array that was probed with either full-length antibody VU4H5, FIG. 69A, or anti-MUC1* antibody MNC2, FIG. 69B. The Allred score for each tissue specimen is shown in the graphs below each array photograph, FIG. 69C-69D. The percentage of each array that did not stain at all with the antibody or stained weakly, medium, or strong is graphed as a pie chart and shown in FIG. 69E-69F.

[0205] FIGS. 70A-70F show photographs of a triple negative breast cancer array stained with anti-MUC1* antibody huMNC2scFv. The first score shown is the Allred score and the second is the tumor grade. The percentage of the array that scored zero, weak, medium or strong is graphed as a pie chart. FIG. 70A shows the pie chart of score of anti-MUC1* antibody staining. FIG. 70B shows a photograph of the array stained with the antibody. FIGS. 70C-70D show magnified photographs of two of the breast cancer specimens from the array. FIGS. 70C-70D show more magnified photographs of the portion of the specimen that is marked by a box.

[0206] FIGS. 71A-71F show photographs of an ovarian cancer array stained with anti-MUC1* antibody huMNC2scFv. The first score shown is the Allred score and the second is the tumor grade. The percentage of the array that scored zero, weak, medium or strong is graphed as a pie chart. FIG. 71A shows the pie chart of score of anti-MUC1* antibody staining. FIG. 71B shows a photograph of the array stained with the antibody. FIGS. 71C-71D show magnified photographs of two of the breast cancer specimens from the array. FIGS. 71C-71D show more magnified photographs of the portion of the specimen that is marked by a box.

[0207] FIGS. 72A-72F show photographs of a pancreatic cancer array stained with anti-MUC1* antibody huMNC2scFv. The first score shown is the Allred score and the second is the tumor grade. The percentage of the array that scored zero, weak, medium or strong is graphed as a pie chart. FIG. 72A shows the pie chart of score of anti-MUC1* antibody staining. FIG. 72B shows a photograph of the array stained with the antibody. FIGS. 72C-72D show magnified photographs of two of the breast cancer specimens from the array. FIGS. 72C-72D show more magnified photographs of the portion of the specimen that is marked by a box.

[0208] FIGS. 73A-73F show photographs of a lung cancer array stained with anti-MUC1* antibody huMNC2scFv. The first score shown is the Allred score and the second is the tumor grade. The percentage of the array that scored zero, weak, medium or strong is graphed as a pie chart. FIG. 73A shows the pie chart of score of anti-MUC1* antibody staining. FIG. 73B shows a photograph of the array stained with the antibody. FIGS. 73C-73D show magnified photographs of two of the breast cancer specimens from the array. FIGS. 73C-73D show more magnified photographs of the portion of the specimen that is marked by a box.

[0209] FIGS. 74A-74I show photographs of normal tissues stained with anti-MUC1* antibody huMNC2scFv.

[0210] FIGS. 75A-75P show photographs of a CAR T co-culture assay in which the targeting antibody fragment of the CAR is huMNC2scFv wherein CAR44 has a CD8 transmembrane domain, followed by 41BB-3zeta and CAR50 has a CD4 transmembrane domain, followed by 41BB-3zeta. The target cancer cells are: HCT-FLR which is HCT-116 cells transfected with MUC1*45 and HCT-MUC1-41TR, which is a stable single cell clone HCT-116 cell line that expresses MUC1 with an extracellular domain truncated after 41 tandem repeats and that does not get cleaved to the MUC1* form on its own. The HCT-MUC1-41TR cancer cells were also incubated with conditioned media from cells transfected with MMP9 or ADAM17 before co-culture with the CAR T cells. Conditioned media of the MMP9 or ADAM17 expressing cells were also incubated with APMA which is an activator of those cleavage enzymes. The images shown are an overlay of the 4× bright field image and the fluorescent image of the same showing cancer cells dyed with a red CMTMR lipophilic dye. FIGS. 75A, 75E, 75I, 75M show photographs of cells co-cultured with untransduced human T cells. FIGS. 75B, 75F, 75J, 75N show photographs of cells co-cultured with human T cells transduced with anti-MUC1* CAR44 at an MOI of 10. FIGS. 75C, 75G, 75K, 75O show photographs of cells co-cultured with human T cells transduced with anti-MUC1* CAR50 at an MOI of 10. FIGS. 75D, 75H, 75L, 75P show photographs of cells co-cultured with human T cells transduced with anti-MUC1* CAR44 at an MOI of 50, which increases transduction efficiency. FIGS. 75B, 75C, 75D show that both CAR44 and CAR50 transduced T cells recognized MUC1* expressed in these cancer cells, bound to them, induced clustering and killed many cancer cells. FIGS. 75F, 75G, 75H show that neither CAR44 nor CAR50 transduced T cells recognize full-length MUC1 expressed in HCT-MUC1-41TR cancer cells. There is no T cell induced clustering and the number of cancer cells has not decreased. FIGS. 75J, 75K, 75L show that activated MMP9 has cleaved full-length MUC1 to a MUC1* form that is recognized by both CAR44 and CAR50 transduced T cells. There is clearly visible CAR T cell induced clustering and a decrease in the number of cancer cells as they are killed. FIGS. 75N, 75O, 75P show that activated ADAM17 has either not cleaved MUC1 or cleaved it at a position not recognized by MNC2. Neither huMNC2-CAR44 nor huMNC2-CAR50 transduced T cells recognized these cancer cells.

[0211] FIGS. 76A-76T show photographs of a CAR T co-culture assay in which the targeting antibody fragment of the CAR is MNC2 scFv wherein CAR44 has a CD8 transmembrane domain, followed by 41BB-3zeta and CAR50 has a CD4 transmembrane domain, followed by 41BB-3zeta. The target cancer cells are breast cancer T47D cells that were also incubated with conditioned media from cells transfected with MMP2, MMP9 or ADAM17 before co-culture with the MNC2-CAR T cells. In some cases, the conditioned media of the MMP2 and MMP9 expressing cells were also incubated with APMA, which is an activator of these cleavage enzymes. The images shown are an overlay of the 4× bright field image and the fluorescent image of the same showing cancer cells dyed with a red CMTMR lipophilic dye. As can be seen, the MNC2-CAR T cells only bind to and attack the target cancer cells that express the cleaved form, MUC1*.

[0212] FIGS. 77A-77I show photographs of cancer cells co-cultured with anti-MUC1* CAR T cells, wherein some of the cancer cells were pre-incubated with activated MMP9 prior to co-culture with the CAR T cells. The cancer cells shown in FIGS. 77A-77C are MUC1 negative colon cancer cell line HCT-116 that have been stably transfected to express MUC1*. The cancer cells shown in FIGS. 77D-77F are MUC1 positive breast cancer cell line T47Ds that express high levels of both MUC1 full-length and MUC1*. The cancer cells shown in FIGS. 77G-77I are MUC1 positive breast cancer cell line T47Ds that were pre-incubated with activated MMP9. The cells shown in FIGS. 77A, 77D and 77G were co-cultured with untransduced human T cells and are the controls. The cells shown in FIGS. 77B, 77E and 77H were co-cultured with human T cells that were transduced with huMNC2-CAR44 at an MOI of 10, wherein MOI stands for multiplicity of infection and the higher the MOI the more CARs are expressed on the T cells. The cells shown in FIGS. 77C, 77F and 77I were co-cultured with human T cells that were transduced with huMNC2-CAR44 at an MOI of 50. As can be seen in the photographs, the CAR44 T cells bind to the target MUC1* positive cancer cells, surrounding and killing them. Comparing the photograph of FIG. S15F with that of FIG. 77I, it can be seen that the cells that were pre-incubated with MMP9 become much more susceptible to CAR T killing when the antibody targeting head of the CAR recognizes MUC1*. It also demonstrates that MUC1 cleaved by MMP9 is recognized by huMNC2scFv.

[0213] FIG. 78 shows an xCelligence graph of T47D breast cancer cells in co-culture with either untransduced T cells, as a control, or huMNC2-CAR44 T cells over a 45 hour period. After 18 hours of cancer cell growth, a catalytic sub-unit MMP9 was added to some of the cells. At 25 hours, T cells were added. As can be seen, huMNC2-CAR44 T cell killing is greatly improved when the T47D cells are pre-incubated with cleavage enzyme MMP9. In the xCelligence system, target cancer cells, which are adherent, are plated onto electrode array plates. Adherent cells insulate the electrode and increase the impedance. The number of adherent cancer cells is directly proportional to impedance. T cells are not adherent and do not contribute to impedance. Therefore, increasing impedance reflects growth of cancer cells and decreasing impedance reflects killing of cancer cells.

[0214] FIG. 79 shows an xCelligence graph of DU145 prostate cancer cells in co-culture with either untransduced T cells, as a control, or huMNC2-CAR44 T cells over a 45 hour period. After 18 hours of cancer cell growth, a catalytic sub-unit MMP9 was added to some of the cells. At 25 hours, T cells were added. As can be seen, huMNC2-CAR44 T cell killing is not affected by pre-incubation with cleavage enzyme MMP9. DU145 cancer cells express a significantly lower amount of MUC1 which includes the full-length form as well as MUC1*. The lower density of MUC1 full-length does not sterically hinder T cell access to the membrane proximal MUC1*.

[0215] FIGS. 80A-80F show photographs of T47D mCherry transfected breast cancer cells co-cultured with either normal human T cells or human T cells transduced with a MUC1* targeting CAR that is GFP positive, green, and wherein the antibody fragment that is the targeting head of the CAR is huMNC2-scFv. FIG. 80A shows breast cancer cells, red, co-cultured with normal human T cells. No T cell induced clustering is evident. FIG. 80B shows breast cancer cells, red, co-cultured with human T cells transduced with huMNC2-CAR18. T cell induced clustering can be seen. FIG. 80C shows the cancer cells co-cultured with huMNC2-CAR19 and T cell induced clustering is seen. FIG. 80D shows the cancer cells co-cultured with a mixture of huMNC2-CAR44 and CAR49 and T cell induced clustering is seen. FIG. 80E shows the cancer cells co-cultured with a huMNC2-CAR44 and T cell induced clustering is seen. FIG. X1F shows the cancer cells co-cultured with huMNC2-CAR50 and T cell induced clustering is seen.

[0216] FIGS. 81A-81D show photographs of human huMNC2-CAR44 T cells injecting granzyme B (yellow) into MUC1* positive and GFP positive (green) DU145 prostate cancer cells. FIG. 81A is a 4× magnified photograph. FIG. 81B is a 20× magnified photograph. FIG. 81C is a 20× magnified photograph. FIG. 81D is a 40× magnified photograph.

[0217] FIGS. 82A-82B show the killing effect of huMNC2-CAR44 T cells on T47D MUC1* positive breast cancer cells, wherein the breast cancer cells have been transfected with increasing amounts of additional MUC1*. As can be seen, the killing effect of the huMNC2-CAR44 T cells increases as the amount of target MUC1* expressed on the cells increases. FIG. 82A is a graph of target cell killing as measured by FACS. FIG. 82B is a graph of an ELISA assay in which the supernatant from the huMNC2-CAR44 T cells in co-culture with the T47D cells is probed for the presence of secreted interferon gamma, which is a sign of T cell activation.

[0218] FIGS. 83A-83D show the results of FACS analysis of huMNC2-CAR44 T cells after 24 hours of co-culture with MUC1* positive cancer cells. FIG. 83A is a graph of FACS data showing the percentage of T47D cancer cells that were killed by huMNC2-CAR44 T cells (blue bars), compared to untransduced T cells (red bars). The X-axis shows the ratio of T cells to cancer cells. FIG. 83B is a graph of FACS data showing the percentage of K562-MUC1* cancer cells that were killed by huMNC2-CAR44 T cells (blue bars), compared to untransduced T cells (red bars). FIG. 83C shows the FACS scans wherein the T47D breast cancer cells were stained with the dye CMTMR. Sytox blue is a dead cell stain. Dead cancer cells are those in quadrants 2 and 3. FIG. 83D shows the FACS scans wherein the K562-MUC1* cancer cells were stained with the dye CMTMR. Sytox blue is a dead cell stain. Dead cancer cells are those in quadrants 2 and 3.

[0219] FIGS. 84A-84H show the cytotoxic effect of huMNC2-CAR44 T cells on MUC1* positive DU145 prostate cancer cells as measured by a variety of assays. FIG. 84A is a fluorescent photograph of untransduced T cells co-cultured with the prostate cancer cells, wherein granzyme B is stained with a red fluorophore. FIG. 84B shows merging of DAPI and granzyme B. FIG. 84C is a fluorescent photograph of huMNC2-CAR44 T cells co-cultured with the prostate cancer cells, wherein granzyme B is stained with a red fluorophore. FIG. 84D shows merging of DAPI and granzyme B. FIG. 84E is a FACS scan for fluorescently labeled granzyme B for untransduced T cells incubated with the cancer cells. FIG. 84F is a FACS scan showing a positive increase in fluorescently labeled granzyme B for huMNC2-CAR44 T cells incubated with the cancer cells. FIG. 84G is a graph of the mean fluorescent intensity. FIG. 84H is an xCELLigence scan tracking the real-time killing of DU145 cancer cells by huMNC2-CAR44 T cells (blue trace) but not by untransduced T cells (green).

[0220] FIGS. 85A-85H show the cytotoxic effect of huMNC2-CAR44 T cells on MUC1* positive CAPAN-2 pancreatic cancer cells as measured by a variety of assays. FIG. 85A is a fluorescent photograph of untransduced T cells co-cultured with the pancreatic cancer cells, wherein granzyme B is stained with a red fluorophore. FIG. 85B shows merging of DAPI and granzyme B. FIG. 85C is a fluorescent photograph of huMNC2-CAR44 T cells co-cultured with the pancreatic cancer cells, wherein granzyme B is stained with a red fluorophore. FIG. 85D shows merging of DAPI and granzyme B. FIG. 85E is a FACS scan for fluorescently labeled granzyme B for untransduced T cells incubated with the cancer cells. FIG. 85F is a FACS scan showing a positive increase in fluorescently labeled granzyme B for huMNC2-CAR44 T cells incubated with the cancer cells. FIG. 85G is a graph of the mean fluorescent intensity. FIG. 85H is an xCELLigence scan tracking the real-time killing of CAPAN-2 cancer cells by huMNC2-CAR44 T cells (blue trace) but not by untransduced T cells (green).

[0221] FIGS. 86A-86C show xCELLigence scans tracking the real-time killing of MUC1* positive cancer cells, but not MUC1* negative cells, by huMNC2-CAR44 T cells. FIG. 86A shows that huMNC2-CAR44 T cells effectively kill HCT colon cancer cells that have been stably transfected with MUC1*. FIG. 86B shows that huMNC2-CAR44 T cells have almost no effect on HCT-MUC1-41TR, which is a MUC1 negative cancer cell that has been stably transfected with a MUC1 full-length. In this cell line only about 10% of the cells have MUC1 cleaved to MUC1*. FIG. 86C shows that huMNC2-CAR44 T cells have no effect on HCT-116 cells, which is a MUC1 negative colon cancer cell line.

[0222] FIGS. 87A-87L show 4× magnification photographs of either untransduced T cells or huMNC2-scFv-CAR44 T cells subjected to either no stimulation, a 1-time bead bearing MUC1* peptide stimulation or a 2-times MUC1* positive cancer cell stimulation. FIGS. 87A-87F show the effect on untransduced T cells. FIGS. 87G-87L show the effect on huMNC2-scFv-CAR44 T cells. FIGS. 87A and 87G received no stimulation. FIGS. 87B and 87H were stimulated twice, 24 hours each stimulation with HCT-MUC1* cancer cells 24 hours prior to photography. FIGS. 87C-87F and FIGS. 87I-87L were stimulated once for 24 hours with 1 μm or 4.5 μm beads coated with the PSMGFR MUC1* extra cellular domain peptide 24 hours prior to photography.

[0223] FIGS. 88A-88D show FACS analysis of the sub-populations of human T cells transduced with huMNC2-scFv-CAR44 as a result of 1-time stimulation by co-culture with beads bearing MUC1* synthetic peptide or 3-time stimulation by co-culture with HCT-MUC1* cancer cells. FIG. 88A shows FACS scan of huMNC2-scFv-CAR44 transduced human T cells without stimulation. FIG. 88B shows FACS scan of huMNC2-scFv-CAR44 transduced human T cells with 1-time stimulation by co-culture with MUC1* peptide presenting beads. FIG. 88C shows FACS scan of huMNC2-scFv-CAR44 transduced human T cells stimulated 3-times by co-culture with HCT-MUC1* cancer cells. FIG. 88D shows graphical representation of the FACS data. FIGS. 88E-88J show graphs of FACS analysis of T cell activation markers after huMNC2-scFv-CAR44 transduced human T cells were subjected to 1-time MUC1* peptide presenting bead stimulation. FIGS. 88E-88F show FACS of activation marker CD25. FIGS. 88G-88H show FACS of activation marker CD69. FIGS. 88I-88J show FACS of activation marker Granzyme B. FIGS. 88E, 88G, 88I show FACS of huMNC2-scFv-CAR44 transduced human T cells without bead stimulation. FIGS. 88F, 88H, 88J show FACS of huMNC2-scFv-CAR44 transduced human T cells after bead stimulation.

[0224] FIGS. 89A-89C show graphs of real time CAR T induced cancer cell killing as measured on an xCELLigence instrument. The figures show the enhanced killing effect of huMNC2-scFv-CAR44 T cells after pre-stimulation by co-culture with MUC1* presenting beads. FIG. 89A shows the enhanced killing effect of peptide bead stimulated huMNC2-CAR44 T cells on SKOV-3 ovarian cancer cells wherein the ratio of T cells to cancer cells was 1:1. FIG. 89B shows the enhanced killing effect of peptide bead stimulated huMNC2-CAR44 T cells on BT-20 triple negative breast cancer cells wherein the ratio of T cells to cancer cells was 1:1. FIG. 89C shows the enhanced killing effect of peptide bead stimulated huMNC2-CAR44 T cells on HCT-MUC1* colon cancer cells wherein the ratio of T cells to cancer cells was 1:1.

[0225] FIGS. 90A-90D show graphs of real time cell growth versus cell death as measured on an xCELLigence instrument. Shown is the effect of MUC1* cancer cell stimulation of huMNC2-scFv-CAR44 transduced human T cells on a variety of cancer cells, some of which were previously resistant to CAR T cell killing. FIG. 90A shows an xCELLigence graph of the effect of huMNC2-scFv-CAR44 transduced human T cells that were pre-stimulated by co-culture with HCT-MUC1* cancer cells 24 hours prior to co-culture with the target T47D breast cancer cells. FIG. 90B shows an xCELLigence graph of the effect of huMNC2-scFv-CAR44 transduced human T cells that were pre-stimulated by co-culture with HCT-MUC1* cancer cells 24 hours prior to co-culture with the target BT-20 triple negative breast cancer cells. FIG. 90C shows an xCELLigence graph of the effect of huMNC2-scFv-CAR44 transduced human T cells that were pre-stimulated by co-culture with HCT-MUC1* cancer cells 24 hours prior to co-culture with the target SKOV-3 ovarian cancer cells. FIG. 90D shows an xCELLigence graph of the effect of huMNC2-scFv-CAR44 transduced human T cells that were pre-stimulated by co-culture with HCT-MUC1* cancer cells 24 hours prior to co-culture with the target HCT-MUC1* cancer cells that were effectively killed with or without pre-stimulation.

[0226] FIGS. 91A-91Y show fluorescent photographs of mice taken on an IVIS instrument. NSG (NOD/SCID/GAMMA) immune compromised mice that on Day 0 were sub-cutaneously implanted on the flank with 500,000 human MUC1* positive cancer cells that had been stably transfected with Luciferase. Tumors were allowed to engraft. On Day 5 after IVIS measurement and on Day 12, animals were injected with 10 million of either human T cells transduced with huMNC2-scFv-CAR44, untransduced T cells or PBS. 5 million T cells were injected intra-tumor and 5 million T cells were injected into the tail vein. 10 minutes prior to IVIS photographs, mice were injected intraperitoneally (IP) with Luciferin, which fluoresces after cleavage by Luciferase, thus making tumor cells fluoresce. FIGS. 91A, 91E, 91I, 91M, 91Q, 91U show photographs of mice that were treated with huMNC2-scFv-CAR44 T cells that had been pre-stimulated by co-culturing for 24 hours with 4 μm beads to which was attached a synthetic MUC1*, PSMGFR peptide 24 hours prior to administration: Protocol 1. FIGS. 91B, 91F, 91J, 91N, 91R, 91V show photographs of mice that were treated with huMNC2-scFv-CAR44 T cells that had been pre-stimulated by twice co-culturing for 24 hours with MUC1* positive cancer cells 24 hours prior to administration: Protocol 2. FIGS. 91C, 91G, 91K, 91O, 91S, 91W show photographs of mice that were treated with untransduced human T cells. FIGS. 91D, 91H, 91L, 91P, 91T, 91X show photographs of mice that were treated with PBS. FIGS. 91A-91D show IVIS photographs taken on Day 5 before T cell injection. FIGS. 91E-91H show IVIS photographs taken on Day 7. FIGS. 91I-91L show IVIS photographs taken on Day 11. FIGS. 91M-91P show IVIS photographs taken on Day 13. FIGS. 91Q-91T show IVIS photographs taken on Day 18. FIGS. 91U-91V show IVIS photographs taken on Day 21. Animals in untransduced T cell and PBS group had to be sacrificed on Day 20 due to excessive tumor volume. FIGS. 91W-91X show photographs of excised tumors. FIG. 91Y is a color scale relating fluorescence in photons/second to color.

[0227] FIGS. 92A-92J show fluorescent photographs of mice taken on an IVIS instrument. NSG (NOD/SCID/GAMMA) immune compromised mice that on Day 0 were sub-cutaneously injected into the flank with 500K human BT-20 cells which are a MUC1* positive triple negative breast cancer cell line. The cancer cells had been stably transfected with Luciferase. Tumors were allowed to engraft. On Day 6 after IVIS measurement, animals were given a one-time injection of 10 million of either human T cells transduced with huMNC2-scFv-CAR44 or untransduced T cells. 5 million T cells were injected intra-tumor and 5 million were injected into the tail vein. 10 minutes prior to IVIS photographs, mice were IP injected with Luciferin, which fluoresces after cleavage by Luciferase, thus making tumor cells fluoresce. FIGS. 92A, 92D, 92G show photographs of mice that were treated with huMNC2-scFv-CAR44 T cells that had been pre-stimulated by co-culturing for 24 hours with 4 μm beads to which was attached a synthetic MUC1*, PSMGFR peptide 24 hours prior to administration: Protocol 1. FIGS. 92B, 92E, 92H show photographs of mice that were treated with huMNC2-scFv-CAR44 T cells that had been pre-stimulated by twice co-culturing for 24 hours with MUC1* positive cancer cells 24 hours prior to administration: Protocol 2. FIGS. 92C, 92F, 92I show photographs of mice that were treated with untransduced human T cells. FIG. 92J is a color scale relating fluorescence in photons/second to color.

[0228] FIGS. 93A-93M show fluorescent photographs of mice taken on an IVIS instrument. NSG (NOD/SCID/GAMMA) immune compromised mice that on Day 0 were injected into the intraperitoneal cavity (IP) with 500K human SKOV-3 cells which are a MUC1* positive ovarian cancer cell line. The cancer cells had been stably transfected with Luciferase. Tumors were allowed to engraft. On Day 4, animals were injected into the intraperitoneal space with 10M either human T cells transduced with huMNC2-scFv-CAR44, untransduced T cells or PBS. On Day 11, animals were injected again except that half the cells were injected into the tail vein and the other half was IP injected. Animals were imaged by IVIS on Days 3, 7, 10 and 15. 10 minutes prior to IVIS photographs, mice were IP injected with Luciferin, which fluoresces after cleavage by Luciferase, thus making tumor cells fluoresce. FIGS. 93A, 93D, 93G, and 93J show photographs of mice that were treated with huMNC2-scFv-CAR44 T cells that had been pre-stimulated by co-culturing for 24 hours with 1 μm beads to which was attached a synthetic MUC1*, PSMGFR peptide 24 hours prior to administration. FIGS. 93B, 93E, 93H, and 93K show photographs of mice that were treated with untransduced human T cells. FIGS. 93C, 93F, 93I, and 93L show photographs of mice that were treated with PBS. FIGS. 93A, 93B and 93C are IVIS images taken Day 3 prior to CAR T, T cell or PBS administration. FIGS. 93D, 93E and 93F show IVIS images of animals on Day 7, just four (4) days after treatment. FIGS. 93G, 93H, and 93I show IVIS images of animals on Day 10. FIGS. 93J, 93K, and 93L show IVIS images of animals on Day 15 FIG. 93M is the IVIS color scale relating fluorescence in photons/second to color.

[0229] FIGS. 94A-94B are cartoons depicting a steric hindrance problem of MUC1 full-length obstructing access of T cells to the growth factor receptor MUC1*. FIG. 94A is a cartoon showing that late stage cancer cells primarily express cleaved MUC1, such that T cells have easy access to the growth factor receptor. FIG. 94B is a cartoon showing that earlier stage cancer cells express both the MUC1* growth factor receptor and full-length MUC1. Full-length MUC1 is 10-times longer than MUC1* so sterically hinders T cell binding to MUC1*. MMP9 is depicted here as a molecular scissors that, after T cell activation, cuts through full-length protein to make MUC1* more accessible.

[0230] FIGS. 95A-95D show Western blots and corresponding FACs analysis of HCT-116 cells which are a MUC1 negative colon cancer cell line, that were then stably transfected with either MUC1* or MUC1 full-length. The single cell clones that are shown are HCT-MUC1-41TR, and HCT-MUC1*. FIG. 95A shows a Western blot of the parent cell line HCT-116, HCT-MUC1-41TR and HCT-MUC1* wherein the gel has been probed with a rabbit polyclonal antibody, SDIX, that only recognizes cleaved MUC1. A visible band between 25 and 35 kDa can be readily seen in Lane 6, loaded with HCT-MUC1*, whereas there is only a faint band in Lanes 4 and 5, showing that only a small amount of MUC1 is cleaved in the HCT-MUC1-41Tr cells. There is no cleaved MUC1 present in the parent cell line HCT-116 loaded into Lanes 2 and 3. FIG. 95B is a Western blot that was probed with a mouse monoclonal antibody VU4H5 that recognizes the tandem repeats of full-length MUC1. As can be seen, only HCT-MUC1-41TR contains full-length MUC1. FIG. 95C shows FACS scans showing that HCT-MUC1* is 95.7% positive for SDIX which only binds to MUC1* and essentially not at all for MUC1 full-length. FIG. 95D shows FACS scans that show that HCT-MUC1-41TR cells are 95% positive for full-length MUC1 and only about 11% positive for the cleaved form, MUC1*.

[0231] FIGS. 96A-96E show photographs of an immunofluorescence experiment. HCT-MUC1-41TR cancer cells express full-length MUC1. Notably, the cell line does not naturally cleave MUC1 to MUC1*. Only about 10-15% of the MUC1 is cleaved to a MUC1* form. Here, we show that exposure of MUC1 full-length to MMP9 catalytic domain causes MUC1 cleavage to MUC1* which is recognized by anti-MUC1* antibody MNC2. The amount of binding of MNC2 to the cells is proportional to the amount of MMP9 added to the cells, which shows that MNC2 binds to MUC1 when it is cleaved by MMP9. FIG. 96A is the control and shows HCT-MUC1-41TR cells that have not been incubated with MMP9 but have been stained with MNC2. FIG. 96B shows HCT-MUC1-41TR cells that were incubated with 12.5 ng/ml MMP9 catalytic domain. FIG. 96C shows HCT-MUC1-41TR cells that were incubated with 25 ng/ml MMP9 catalytic domain. FIG. 96D shows HCT-MUC1-41TR cells that were incubated with 50 ng/ml MMP9 catalytic domain. FIG. 96E shows HCT-MUC1-41TR cells that were incubated with 100 ng/ml MMP9 catalytic domain.

[0232] FIG. 97 shows a graph of a fluorogenic peptide substrate of MMP9, the OMNIMMP peptide, being cleaved by MMP9 catalytic domain at two concentrations in either PBS, solid trace, or cell culture media, dashed trace.

[0233] FIGS. 98A-98F are photographs of Western blots of cell lysates probed with an antibody that recognizes the MMP9 construct that was transfected. A plasmid was constructed then transfected into HEK293T cells, wherein the gene for MMP9 catalytic domain was inserted downstream of either 3 or 4 NFAT response elements. The NFAT pathway was activated by the addition of PMA at 10 ng/ml and Ionomycin at either 1 uM or 2 uM, except in control (ctl) cells in lanes 1, 2, 5, 6, 9, 10, 13, and 14. Lysate from cells transfected with the plasmid containing 3 repeats of a NFAT Response element were loaded into lanes 1, 3, 5, 7, 9, 11, 13, and 15. Lysate from cells transfected with the plasmid containing 4 repeats of a NFAT Response element were loaded into lanes 2, 4, 6, 8, 10, 12, 14, and 16. FIG. 98A and FIG. 98C show photographs exposed for 1 minute, whereas FIG. 98B and FIG. 98D show photographs exposed for 5 minutes. To the cell lysates of FIG. 98A and FIG. 98B no protease inhibitor was added. To the cell lysates of FIG. 98C and FIG. 98D a protease inhibitor was added. FIG. 98E shows photograph of Western blot in which MMP9 catalytic domain expressed off repeats of NFAT response element was pulled down from conditioned media of cells whose lysates are shown in FIG. 98A and FIG. 98B, lanes 7 and 8. Pulldown was done using beads to which were coupled an antibody that recognizes a Flag tag that was incorporated at the C-terminus of the MMP9 construct. Lane 1 shows a molecular weight control. Lanes 2, 3, 4 and 5 show MMP9 that was eluted from the anti-Flag tag beads. Lanes 2 and 3 were first elutions and the cells shown in Lanes 4 and 5 were second elutions. Into Lanes 2 and 4 were loaded conditioned media from cells in which the NFAT pathway had been activated with PMA 10 ng/ml and Ionomycin at 1 uM. Into Lanes 3 and 5 were loaded conditioned media from cells in which the NFAT pathway had been activated with PMA 10 ng/mL and Ionomycin at 2 uM. FIG. 98F is a schematic of the construct.

[0234] FIGS. 99A-99C show graphs of a fluorogenic peptide, OMNIMMP peptide, substrate of MMP9 being cleaved by the cell lysate or conditioned media of HEK293T cells that were transfected with a plasmid containing an MMP9 gene downstream from 4 repeats of an NFAT response element. The MMP9 peptide substrate assay shows that activation of the NFAT pathway by PMA/ionomycin caused an MMP9 to be expressed and secreted and that it was active as evidenced by its ability to cleave a peptide substrate. FIG. 99C is a schematic of the construct.

[0235] FIGS. 100A-100E show NFAT-induced MMP9 catalytic domain expressed in HEK293T cells wherein the native leader sequence of MMP9 has been replaced by an IgK leader sequence and MMP9 catalytic domain is downstream of 4 repeats of an NFAT response element. FIG. 100A shows photograph of Western blot detecting expression of MMP9 in the cell lysate after activation of the NFAT pathway. FIG. 100B shows photograph of Western blot detecting expression of MMP9 in the conditioned media after activation of the NFAT pathway. FIG. 100C shows graph of MMP9 fluorogenic peptide substrate, OMNIMMP peptide, cleavage by MMP9 catalytic domain expressed and secreted in conditioned media of HEK293T cells wherein the native leader sequence of MMP9 has been replaced by an IgK leader sequence and MMP9 catalytic domain is downstream of 4 repeats of an NFAT response element. FIG. 100D shows graph of MMP9 fluorogenic peptide substrate cleavage by MMP9 catalytic domain expressed and secreted in conditioned media of HEK293T cells wherein the native leader sequence of MMP9 has been replaced by an IgK leader sequence and MMP9 catalytic domain is downstream of 4 repeats of an NFAT response element. FIG. 100E is a schematic of the construct.

[0236] FIGS. 101A-101E show MMP9 can be expressed with different leader sequences and also show subsequent activity of each. FIG. 101A shows a Western blot detecting an MMP9 protein in cell lysate wherein the leader sequence upstream of the MMP9 gene is either its native sequence or an IgK sequence. FIG. 101B shows a Western blot detecting MMP9 in conditioned media wherein the leader sequence upstream of the MMP9 gene is its native sequence or an IgK sequence. FIG. 101C shows a graph of an MMP9 peptide substrate cleaved by the expressed MMP9. FIGS. 101D-101E are schematics of the constructs.

[0237] FIGS. 102A-102D show three (3) clones 4, 6 and 7 of cells transfected with a plasmid that produces an NFAT inducible MMP9 wherein the NFATc1 promoter sequence is upstream of the MMP9 gene, which in this case is a truncated MMP9 comprising its catalytic domain. Also shown for comparison is a cell transfected with a plasmid that produces an NFAT inducible MMP9 wherein 4 repeats of an NFAT response element sequence are upstream of an MMP9 gene. FIG. 102A shows a Western blot detecting an MMP9 protein in cell lysate. FIG. 102B shows a Western blot detecting MMP9 in the conditioned media. FIGS. 102C-102D are schematics of the constructs.

[0238] FIGS. 103A-103D show graphs of an MMP9 peptide substrate cleavage assay. FIG. 103A shows the cleavage activity of MMP9 from the lysate of cells transfected with a plasmid having MMP9 expression driven off of the NFATc1 promoter or off of 4 repeats of an NFAT response element. FIG. 103B shows the cleavage activity of MMP9 from the conditioned media of cells transfected with a plasmid having MMP9 expression driven off of the NFATc1 promoter or off of 4 repeats of an NFAT response element. FIGS. 103C-103D are schematics of the constructs.

[0239] FIGS. 104A-104B show the results of the OMNIMMP9 fluorogenic substrate assay that measures activity of MMP9. Conditioned media from human T cells transduced with NFAT-inducible MMP9 alone or in combination with CAR44 were added to the assay and MMP9 substrate cleavage was measured as a function of time. FIG. 104A shows MMP9 activity when human T cells were transduced with both CAR44 and an NFAT-inducible MMP9 after the cells were activated by co-culturing with HCT-MUC1* cancer cells. The trace that does not show increased substrate cleavage as a function of time is the conditioned media from cells that were not activated. FIG. 104B shows MMP9 activity when human T cells were transduced with just an NFAT-inducible MMP9 after the cells were activated by co-culturing with beads coated with anti-CD3 and anti-CD28 which are known to activate T cells. The trace that does not show increased substrate cleavage as a function of time is the conditioned media from cells that were not activated.

[0240] FIGS. 105A-105E show photographs of Western blots of human T cells transduced with either CAR44 alone, NFAT-inducible MMP9 alone or transduced with both CAR44 and NFAT-inducible MMP9, wherein the resultant T cells are either not activated, chemically activated by PMA/Ionomycin, activated by co-culturing with beads presenting synthetic MUC1* peptide or co-culturing with MUC1* positive cancer cells. Western blot was probed with an anti-Flag tag also known as DYK tag antibody. Catalytic domain of MMP9 runs with an apparent molecular weight of about 40 kDa. FIGS. 105A-105D show photographs of Western blots of cleared cell lysates. FIG. 105A has Lanes 1-7 loaded with lysates of: Lane 1: T cells transduced with CAR44 and not activated; Lane 2: T cells transduced with CAR44 and activated with beads presenting synthetic MUC1* extra cellular domain peptide; Lane 3: T cells transduced with CAR44 and activated by co-culture with HCT-MUC1* cancer cells; Lane 4: T cells transduced with CAR44 and NFAT-inducible MMP9 but not activated; Lane 5: T cells transduced with CAR44 and NFAT-inducible MMP9 and activated with beads presenting synthetic MUC1* extra cellular domain peptide; Lane 6: T cells transduced with CAR44 and NFAT-inducible MMP9 and activated by co-culture with HCT-MUC1* cancer cells; Lane 7: an irrelevant protein also bearing the Flag DYK tag. Results show that T cells transduced with NFAT-inducible MMP9 only express MMP9 when they are activated by PMA/Ionomycin, MUC1* beads or MUC1* positive cancer cells. T cells transduced with both CAR44 and NFAT-inducible MMP9 only express MMP9 when the T cells are activated by stimulation with MUC1* beads or with MUC1* positive cancer cells. FIG. 105B has Lanes 1-7 loaded with lysates of: Lane 1: T cells transduced with CAR44 and not activated; Lane 2: T cells transduced with CAR44 and activated with beads presenting anti-CD3 and anti-CD28 antibodies that are known to activate T cells; Lane 3: T cells transduced with CAR44 and activated by co-culture with PMA/Ionomycin; Lane 4: T cells transduced with NFAT-inducible MMP9 but not activated; Lane 5: T cells transduced with NFAT-inducible MMP9 and activated with beads presenting anti-CD3 and anti-CD28 antibodies; Lane 6: T cells transduced with NFAT-inducible MMP9 and activated by PMA/Ionomycin; Lane 7: an irrelevant protein also bearing the Flag DYK tag. FIGS. 105C and 105D are darker exposures of the same Western blots shown in FIGS. 105A and 105B, respectively. FIG. 105E is a photograph of a Western blot of cell supernatants of cells transduced as follows: Lane 1: T cells transduced with CAR44 and not activated; Lane 2: T cells transduced with CAR44 and activated with beads presenting anti-CD3 and anti-CD28 antibodies that are known to activate T cells; Lane 3: T cells transduced with CAR44 and activated by co-culture with PMA/Ionomycin; Lane 4: T cells transduced with NFAT-inducible MMP9 but not activated; Lane 5: T cells transduced with NFAT-inducible MMP9 and activated with beads presenting anti-CD3 and anti-CD28 antibodies; Lane 6: T cells transduced with NFAT-inducible MMP9 and activated by PMA/Ionomycin; Lane 7: an irrelevant protein also bearing the Flag DYK tag. Results show that T cells transduced with NFAT-inducible MMP9 express MMP9 when they are activated. T cells transduced with both CAR44 and NFAT-inducible MMP9 are specifically activated when they are co-cultured with beads or cells presenting or expressing MUC1* (FIG. 105A Lane 5 and Lane 6).

[0241] FIGS. 106A-106B show a cartoon of a series of “long-arm” CARs that were generated to overcome the steric hindrance caused by full-length MUC1. FIG. 106A shows a cartoon of the CARs with longer linker region between the cell membrane and the antibody scfv. FIG. 106B shows a cartoon of how they overcome steric hindrance of MUC1 full-length.

[0242] FIGS. 107A-107B show xCelligence graphs of MUC1 positive breast cancer T47D cells in co-culture with either untransduced T cells, as a control, or several different long-arm CAR T cells, wherein the length and sequence of the linker between the antibody scFv and the transmembrane domain is varied as indicated. FIG. 107A shows impedance as a function of time for the various CAR T cells that were tested. FIG. 107B shows the same data but wherein the slope of the trace is graphed as a function of time.

[0243] FIGS. 108A-108P show photographs of a cell binding assay in which cells were transduced with CARs having variable length linker regions between the antibody fragment and the transmembrane domain. The CAR-transduced cells carry a GFP fluorescent maker so are green. MUC1* positive cancer cells that have been stained red with CMTMR dye are then added to the CAR expressing cells. The degree to which the CARs are able to recognize their target on cancer cells is reflected by the amount of yellow (green plus red). FIG. 108A is the control, untransduced cells. FIG. 108B cells were transduced with CAR44 where the linker region is derived from CD8 extra cellular domain. FIG. 108C shows a CAR with a linker that is a portion of an antibody Fc region. FIG. 108D shows a CAR with a linker that is a portion of an antibody Fc region, minus its hinge region. FIG. 108E shows a CAR with a linker that is a 4-repeat flexible linker sequence. FIG. 108F shows a CAR with a linker that is a portion of an IgD antibody. FIG. 108G shows a CAR with a linker that is a portion of an IgD antibody plus an Fc region. FIG. 108H shows a CAR with a linker that is a portion of an IgD antibody plus an Fc region devoid of its hinge region. FIGS. 1081-108M show photographs of CAR expressing cells after incubation with MUC1* expressing cancer cells, after sufficient wash steps.

[0244] FIG. 109 shows photographs of female NOD/SCID/GAMMA mice that have been intraperitoneally implanted with 500K MUC1* positive SKOV-3 human ovarian cancer cells. Photographs show mice treated with either anti-MUC1* CAR T cells, or as controls, untransduced T cells, “UT”, or PBS. On Day 53, mice were injected with 4 ug catalytically active MMP9 fragment and 10M anti-MUC1* CAR T cells. As can be seen, three days later at Day 56, mice that received MMP9 and anti-MUC1* CAR T cells show a dramatic reduction in tumor burden or complete elimination of tumor cells.

[0245] FIG. 110 shows IVIS measurements of tumor burden between Day 49 and Day 56, wherein mice treated with anti-MUC1* CAR T cells were also i.p. injected with a catalytically active MMP9, along with 10M anti-MUC1* CAR T cells. Mice in the control groups were treated with untransduced T cells or PBS in the same quantity and volume. On Day 56 IVIS tumor measurements showed that of the 5 mice treated with CAR T cells and MMP9, one had a 99.5% decrease in tumor burden, the second had a 92.4% decrease, a third had a 47% decrease, the fourth had no change and the fifth mouse in that group had no detectable tumor on Day 49 or 56. The effect of the MMP9 is clear, especially when compared to the control groups over the same time period. The untransduced mice and the PBS treated mice, from Day 49 to Day 56, had average increases in tumor volume of 118% and 127%, respectively

[0246] FIG. 111 shows a photograph of a Western blot in which a cleavage resistant HCT-MUC1 full-length cell line is treated with varying amounts of a catalytically active ADAM17 or MMP14. Shed MUC1 tandem repeat domain is immunoprecipitated from the conditioned media, run on a gel and probed with a rabbit polyclonal antibody raised against the membrane proximal 45 amino acids of the MUC1* extra cellular domain. As can be seen, MMP14 efficiently cleaved MUC1 full-length and shed the tandem repeat containing extra cellular domain into the conditioned media.

[0247] Table 1 shows details of many of the anti-MUC1* CARs that were generated and tested. For each construct shown, a number assigned to that CAR, promoter used, signal peptide, antibody species, sequences of scFv, hinge region, transmembrane domain, and signaling motifs used in each CAR, length of the insert in number of base pairs, its molecular weight and the length of the construct are displayed.

[0248] Table 2 shows cytokine release data for some of the CARs after transduction into human T cells and co-cultured with a variety of cancer cells.

### DETAILED DESCRIPTION OF THE PREFERRED EMBODIMENTS

[0249] In the present application, “a” and “an” are used to refer to both single and a plurality of objects.

[0250] As used herein, occasionally, in short hand, a polypeptide is indicated as being “transduced or transfected” into a cell. In these occurrences, it is understood that the nucleic acid encoding the polypeptide sequence is transduced or transfected into the cell, as it is an impossibility that a polypeptide could be transduced or transfected into a cell.

[0251] As used herein, occasionally when referring to number of cells injected into an animal or otherwise contextually wherein the number of cells is referred to, “M” refers to millions, and “K” refers to thousands.

[0252] As used herein, interchangeable designations for various monoclonal antibodies are used, such as, “MN-C2”, which is interchangeable with “C2”, “Min-C2” and “MNC2”; “MN-E6”, which is interchangeable with “E6”, “Min-E6” and “MNE6”; “MN-C3”, which is interchangeable with “C3”, “Min-C3” and “MNC3”; and “MN-C8”, which is interchangeable with “C8”, “Min-C8” and “MNC8”.

[0253] As used herein, “h” or “hu” placed before an antibody construct is short-hand for humanized.

[0254] As used herein, the term “antibody-like” means a molecule that may be engineered such that it contains portions of antibodies but is not an antibody that would naturally occur in nature. Examples include but are not limited to CAR (chimeric antigen receptor) T cell technology and the Ylanthia® technology. The CAR technology uses an antibody epitope fused to a portion of a T cell so that the body's immune system is directed to attack a specific target protein or cell. The Ylanthia® technology consists of an “antibody-like” library that is a collection of synthetic human Fabs that are then screened for binding to peptide epitopes from target proteins. The selected Fab regions can then be engineered into a scaffold or framework so that they resemble antibodies.

[0255] As used herein, “PSMGFR” is abbreviation for Primary Sequence of the MUC1 Growth Factor Receptor which is identified by SEQ ID NO:2, and thus is not to be confused with a six amino acid sequence. “PSMGFR peptide” or “PSMGFR region” refers to a peptide or region that incorporates the Primary Sequence of the MUC1 Growth Factor Receptor (SEQ ID NO:2).

[0256] As used herein, the “MUC1*” extra cellular domain is defined primarily by the PSMGFR sequence (GTINVHDVETQFNQYKTEAASRYNLTISDVSVSDVPFPFSAQSGA (SEQ ID NO:2)). Because the exact site of MUC1 cleavage depends on the enzyme that clips it, and that the cleavage enzyme varies depending on cell type, tissue type or the time in the evolution of the cell, the exact sequence of the MUC1* extra cellular domain may vary at the N-terminus.

[0257] Other clipped amino acid sequences may include SNIKFRPGSVVVQLTLAFREGTINVHDVETQFNQYKTEAASRY (SEQ ID NO:620); or SVVVQLTLAFREGTINVHDVETQFNQYKTEAASRY (SEQ ID NO:621).

[0258] As used herein, the term “PSMGFR” is an acronym for Primary Sequence of MUC1 Growth Factor Receptor as set forth as GTINVHDVETQFNQYKTEAASRYNLTISDVSVSDVPFPFSAQSGA (SEQ ID NO:2). In this regard, the “N-number” as in “N-10 PSMGFR”, “N-15 PSMGFR”, or “N-20 PSMGFR” refers to the number of amino acid residues that have been deleted at the N-terminal end of PSMGFR. Likewise “C-number” as in “C-10 PSMGFR”, “C-15 PSMGFR”, or “C-20 PSMGFR” refers to the number of amino acid residues that have been deleted at the C-terminal end of PSMGFR.

[0259] As used herein, the “extracellular domain of MUC1*” refers to the extracellular portion of a MUC1 protein that is devoid of the tandem repeat domain. In most cases, MUC1* is a cleavage product wherein the MUC1* portion consists of a short extracellular domain devoid of tandem repeats, a transmembrane domain and a cytoplasmic tail. The precise location of cleavage of MUC1 is not known perhaps because it appears that it can be cleaved by more than one enzyme. The extracellular domain of MUC1* will include most of the PSMGFR sequence but may have an additional 10-20 N-terminal amino acids.

[0260] As used herein “sequence identity” means homology in sequence of a particular polypeptide or nucleic acid to a reference sequence of nucleic acid or amino acid such that the function of the homologous peptide is the same as the reference peptide or nucleic acid. Such homology can be so close with the reference peptide such that at times the two sequences may be 90%, 95% or 98% identical yet possess the same function in binding or other biological activities.

[0261] As used herein, “MUC1 positive” cell refers to a cell that expresses a gene for MUC1, MUC1-Y or MUC1-Z or other MUC1 variant.

[0262] As used herein, “MUC1 negative” cell refers to a cell that does not express a gene for MUC1.

[0263] As used herein, “MUC1* positive” cell refers to a cell that expresses a gene for MUC1, wherein that gene's expressed protein is a transmembrane protein that is devoid of tandem repeats, which may be a consequence of post-translational modification, cleavage, alternative splicing, or transfecting or transducing a cell with a MUC1 protein that is devoid of tandem repeats.

[0264] As used herein, “MUC1* negative” cell refers to a cell that may or may not express a gene for MUC1 but does not express a MUC1 transmembrane protein that is devoid of tandem repeats.

[0265] As used herein, “MUC1 positive” cancer cell refers to a cancer cell that overexpresses the gene for MUC1, expresses MUC1 in an aberrant pattern, wherein its expression is not restricted to the apical border and/or expresses a MUC1 that is devoid of tandem repeats.

[0266] As used herein, “MUC1 negative” cancer cell refers to a cancer cell that may or may not express a gene for MUC1 but does not overexpress MUC1 or does not overexpress a MUC1 transmembrane protein that is devoid of tandem repeats.

[0267] As used herein, “MUC1* positive” cancer cell refers to a cancer cell that overexpresses a MUC1 transmembrane protein that is devoid of tandem repeats.

[0268] As used herein, “MUC1* negative” cancer cell refers to a cancer cell that may or may not express a gene for MUC1 but does not overexpress a MUC1 transmembrane protein that is devoid of tandem repeats.

### MUC1* Antibodies (Anti-PSMGFR) for Treatment or Prevention of Cancers

[0269] We discovered that a cleaved form of the MUC1 (SEQ ID NO:1) transmembrane protein is a growth factor receptor that drives the growth of over 75% of all human cancers. The cleaved form of MUC1, which we called MUC1* (pronounced muk 1 star), is a powerful growth factor receptor. Enzymatic cleavage releases the bulk of the MUC1 extracellular domain. It is the remaining portion comprising a truncated extracellular domain, transmembrane domain and cytoplasmic tail that is called MUC1*. Cleavage and release of the bulk of the extracellular domain of MUC1 unmasks a binding site for activating ligands dimeric NME1, NME6, NME8, NME7-AB, NME7-X1 or NME7. Cell growth assays show that it is ligand-induced dimerization of the MUC1* extracellular domain that promotes growth (FIGS. 1A-1D). MUC1* positive cells treated with either bivalent ‘bv’ anti-MUC1* antibody, monovalent ‘mv’ or Fab, NM23-H1 dimers or NME7-AB. Bivalent anti-MUC1* antibodies stimulate growth of cancer cells whereas the monovalent Fab inhibits growth. Classic bell-shaped curve indicates ligand induced dimerization stimulates growth. Dimeric NM23-H1, aka NME1, stimulates growth of MUC1* positive cancer cells but siRNA to suppress MUC1 expression eliminate its effect (FIG. 1C). NME7-AB also stimulates the growth of MUC1* positive cells (FIG. 1D).

[0270] MUC1* is an excellent target for cancer drugs as it is aberrantly expressed on over 75% of all cancers and is likely overexpressed on an even higher percentage of metastatic cancers. After MUC1 cleavage, most of its extracellular domain is shed from the cell surface. The remaining portion has a truncated extracellular domain that at least comprises the primary growth factor receptor sequence, PSMGFR (SEQ ID NO:2). Antibodies that bind to the PSMGFR sequence and especially those that competitively inhibit the binding of activating ligands such as NME proteins, including NME1, NME6, NME8, NME7AB, NME7-X1 and NME7, are ideal therapeutics and can be used to treat or prevent MUC1 positive or MUC1* positive cancers, as stand-alone antibodies, antibody fragments or variable region fragments thereof incorporated into bispecific antibodies, or chimeric antigen receptors also called CARs, which are then transfected or transduced into immune cells, then administered to a patient.

[0271] Therapeutic anti-MUC1* antibodies can be monoclonal, polyclonal, antibody mimics, engineered antibody-like molecules, full antibodies or antibody fragments. Examples of antibody fragments include but are not limited to Fabs, scFv, and scFv-Fc. Human or humanized antibodies are preferred for use in the treatment or prevention of cancers. In any of these antibody-like molecules, mutations can be introduced to prevent or minimize dimer formation. Anti-MUC1* antibodies that are monovalent or bispecific are preferred because MUC1* function is activated by ligand induced dimerization. Typical binding assays show that NME1 and NME7-AB bind to the PSMGFR peptide portion of MUC1* (FIGS. 2A, 2D). Further, they show that these activating growth factors bind to the membrane proximal portion of MUC1*, as they do not bind to the PSMGFR peptide if the 10 C-terminal amino acids are missing. Similarly, anti-MUC1* antibodies MN-C2 and MN-E6 bind to the PSMGFR peptide if an only if the 10 C-terminal amino acids are present (FIGS. 2B, 2C). Antibodies MN-C3 and MN-C8 bind to epitopes that are different from MN-C2 and MN-E6, as they do not depend on the presence of the 10 C-terminal amino acids of the PSMGFR peptide (FIGS. 2E, 2F). Antibodies MN-C2, MN-E6, MN-C3 or MN-C8, or fragments derived from them, can be administered to a patient for the treatment or prevention of cancers, as stand-alone antibodies or incorporated into bispecific antibodies, BiTEs or chimeric antigen receptors also called CARs that have been transduced into immune cells. MNC2 and MNE6 and other anti-MUC1* antibodies that competitively inhibit the binding of NME1 and NME7-AB are preferred for use as stand alone antibody therapeutics.

[0272] Therapeutic anti-MUC1* antibodies for use as a stand alone antibody therapeutic or for integration into a BiTE or a CAR can be selected based on specific criteria. The parent antibody can be generated using typical methods for generating monoclonal antibodies in animals. Alternatively, they can be selected by screening antibody and antibody fragment libraries for their ability to bind to PSMGFR peptide (SEQ ID NO:2), a MUC1* peptide, which can be the SNIKFRPGSVVVQLTLAFREGTINVHDVETQFNQYKTEAASRY (SEQ ID NO:620); or SVVVQLTLAFREGTINVHDVETQFNQYKTEAASRY (SEQ ID NO:621).

[0273] Resultant antibodies or antibody fragments generated or selected in this way can then be further selected by passing additional screens. For example, antibodies or antibody fragments become more preferred based on their ability to bind to MUC1* positive cancer cells or tissues but not to MUC1 negative cancer cells or to normal tissues. Further, anti-MUC1* antibodies or antibody fragments may be de-selected as anti-cancer therapeutics if they bind to stem or progenitor cells. Anti-MUC1* antibodies or antibody fragments become more preferred if they have the ability to competitively inhibit the binding of activating ligands to MUC1*. FIGS. 3A-3C shows that MN-E6 and MN-C2 competitively inhibit the binding of activating ligands NME1 and NME7 to MUC1*.

[0274] A process for selecting anti-MUC1* antibodies for use in treating a patient diagnosed with a MUC1 positive cancer, at risk of developing a MUC1 positive cancer or suspected of having a MUC1 positive cancer comprises one or more of the following steps of selecting antibodies or antibody fragments that 1) bind to the PSMGFR peptide; 2) bind to the N-10 PSMGFR peptide; 3) bind to cancer cells; 4) do not bind to stem or progenitor cells; and 5) competitively inhibited the binding of dimeric NME1 or NME7-AB to the PSMGFR peptide. For example, FIGS. 3A-3C show that monoclonals MN-E6 and MN-C2 satisfy all five criteria, while monoclonals MN-C3 and MN-C8 do not competitively inhibit the binding of activating ligands NME1 and NME7 (FIG. 3C). However, antibodies or antibody fragments derived from MN-C3 and MN-C8 are equally potent as anti-cancer agents when integrated into a BiTE or a CAR as in these methods, the killing effect of the immune cells is more important than the ability to inhibit the binding of activating ligands. In addition, toxic agents conjugated to MN-E6, MN-C2, MN-C3 or MN-C8 are potent anti-cancer therapeutics. Recall that the MUC1* growth factor receptor is activated by ligand-induced dimerization of its extracellular domain. Therefore, the ideal antibody therapeutic should not dimerize the MUC1* extracellular domain. Preferably, suitable antibodies in this regard include monovalent antibodies such as those generated in lamas and camels, Fabs, scFv's, single domain antibodies (sdAb), scFv-Fc as long as the Fc portion is constructed such that it does not homo-dimerize.

[0275] FACS scans show that anti-MUC1* antibodies MN-C2 and MN-E6 specifically bind to MUC1* positive solid tumor cancer cells and MUC1* transfected cells but not MUC1* negative or MUC1 negative cells. MNC3 and MNC8 bind to blood progenitor cells as well as to blood cancer cells, since these diseases are characterized by the inability of blood progenitor cells to terminally differentiate. Therefore, MNC3 and MNC8 are preferred for the treatment of blood cancers, as stand alone therapeutics, BiTEs or CAR T therapeutics. In one example, a humanized MN-C2 scFv is shown to bind to ZR-75-1, aka 1500, MUC1* positive breast cancer cells (FIGS. 4A-4C). MN-E6 was shown to bind to MUC1 negative HCT-116 colon cancer cells if an only if they were transfected with MUC1*. MN-E6 also bound to MUC1* positive cancer cells such as ZR-75-1, aka 1500, MUC1* positive breast cancer cells (FIGS. 4D-4F). Binding assays such as ELISAs, immunofluorescence, and the like all confirm that MN-C2 and MN-E6 bind to the PSMGFR peptide and to live MUC1 positive cancer cells. Humanized anti-MUC1* antibodies are selected based on their ability to also bind to the PSMGFR peptide or to MUC1 positive cancer cells. FIG. 5 shows that humanized MN-C2 scFv binds with high affinity to the MUC1* peptide PSMGFR with an EC-50 of about 333 nM. Humanized MN-C2 scFv, like Fabs, potently inhibits the growth of MUC1* positive cancer cells as is shown in one example in FIGS. 6A, 6B.

[0276] The Fabs of MN-E6 and MN-C2 or the comparable single chain variable regions derived from them potently inhibit the growth of MUC1* positive cancers in vitro and in vivo. In several examples, the Fabs of Anti-MUC1* antibodies inhibited the growth of human MUC1* positive cancers in vivo. In one case, immune-compromised mice were implanted with human breast tumors then treated with MN-E6 Fab after tumor engraftment. FIG. 7A shows that MN-E6 Fab potently inhibited the growth of MUC1* positive breast cancers. Female nu/nu mice implanted with 90-day estrogen pellets were implanted with 6 million T47D human breast cancer cells that had been mixed 50/50 with Matrigel. Mice bearing tumors that were at least 150 mm\hat{ }3 and had three successive increases in tumor volume were selected for treatment. Animals were injected sub-cutaneously twice per week with 80 mg/kg MN-E6 Fab and an equal number of mice fitting the same selection criteria were injected with vehicle alone (FIG. 7A).

[0277] In another aspect, MN-E6 was shown to halt the growth of prostate cancer. FIG. 7B shows that MN-E6 Fab potently inhibited the growth of MUC1* positive prostate cancers. Male NOD/SCID mice were implanted with 6 million DU-145 human prostate cancer cells that had been mixed 50/50 with Matrigel. Mice bearing tumors that were at least 150 mm\hat{ }3 and had three successive increases in tumor volume were selected for treatment. Animals were injected sub-cutaneously every 48 hours with 160 mg/kg MN-E6 Fab and an equal number of mice fitting the same selection criteria were injected with vehicle alone (FIG. 7B). Tumors were measured independently by two researchers twice per week and recorded. Statistics were blindly calculated by independent statistician, giving a P value of 0.0001 for each. Anti-MUC1* Fab inhibited breast cancer growth and prostate cancer growth. Treatment had no effect on weight, bone marrow cell type or number. The MN-E6 Fab effectively inhibited the growth of the tumors, while the control group's tumors continued to grow until sacrifice. No adverse effects of treatment were observed or detected.

[0278] Recombinant forms of MN-E6 and MINERVA-C2 were constructed that like the Fab are monomeric. In this case, MN-E6 was humanized and MINERVA-C2 was humanized. There are a number of methods known to those skilled in the art for humanizing antibodies. In addition to humanizing, libraries of human antibodies can be screened to identify other fully human antibodies that bind to the PSMGFR. FIG. 8 is a graph of an ELISA assay showing differing levels of expression of humanized MN-E6 anti-MUC1* antibody depending on whether the light chain was kappa or lambda and whether the variable portion was fused to a human IgG1 or IgG2. FIG. 9 is a graph of an ELISA assay comparing the binding of the parent mouseMN-E6 antibody to the humanized versions of the MN-E6 antibody to a surface presenting the PSMGFR peptide derived from the MUC1* extracellular domain. FIG. 10 is a graph of an ELISA assay showing differing levels of expression of humanized MN-C2 anti-MUC1* antibody depending on whether the light chain was kappa or lambda and whether the variable portion was fused to a human IgG1 or IgG2. FIG. 11 is a graph of an ELISA assay comparing the binding of the parent mouse MN-C2 antibody to the humanized versions of the MN-C2 antibody to a surface presenting the PSMGFR peptide derived from the MUC1* extracellular domain. FIG. 12 is a graph of an ELISA assay showing binding of humanized single chain (scFv) MN-C2 and MN-E6 antibodies binding to a surface presenting the PSMGFR peptide derived from the MUC1* extracellular domain.

[0279] A single chain of the humanized MN-E6 variable region, called an scFv, was genetically engineered such that it was connected to the Fc portion of the antibody (SEQ ID NO:256 and 257). Fc regions impart certain benefits to antibody fragments for use as therapeutics. The Fc portion of an antibody recruits complement, which in general means it can recruit other aspects of the immune system and thus amplify the anti-tumor response beyond just inhibiting the target. The addition of the Fc portion also increases the half-life of the antibody fragment (Czajkowsky D M, Hu J, Shao Z and Pleass R J. (2012) Fc-fusion proteins: new developments and future perspectives. EMBO Mol Med. 4(10):1015-1028).

[0280] However, the Fc portion of an antibody homo-dimerizes, which in the case of anti-MUC1* antibody based therapeutics is not optimal since ligand-induced dimerization of the MUC1* receptor stimulates growth. As can be seen in FIG. 13 B, humanized MN-E6 scFv-Fc is a dimer, in part due to disulfide bonding. Therefore, mutations in the Fc region that resist dimer formation are preferred for anti-MUC1* anti-cancer therapeutics. Deletion of the hinge region (hingeless also called delta hinge or Dhinge in some figures and examples SEQ ID NO: 288 and 289) and other mutations in the Fc region that make the Fc-mutant resistant to dimerization were made. The following mutations were made in the CH3 domain to create a monomeric scFv-Fc fusion protein: Y407R (SEQ ID NO: 278 and 279), F405Q (SEQ ID NO: 280 and 281), T394D (SEQ ID NO: 282 and 283), T366W/L368W (SEQ ID NO: 284 and 285), T364R/L368R (SE ID NO: 286 and 287). FIG. 14 shows photographs of SDS-PAGE characterization of purified MN-E6 scFv-Fc fusion proteins on a non-reducing gels, wherein the Fc portion that was fused to the MN-E6 was either wild type (wt) or mutated as follows: A) F405Q, Y407R, T394D; B) T366W/L368W, T364R/L368R, T366W/L368W or T364R/L368R. Fc mutants F405Q, Y407R, T366W/L368W, T364R/L368R, T366W/L368W and T364R/L368R all favored monomer over dimer formation. FIG. 15 shows FPLC traces of the purification of MN-E6 scFv-Fc Y407Q fusion protein that was grown in low IgG FBS over a Protein A affinity column. A) is the trace of the flow through. B) is the trace of the elution. The protein was further purified by size exclusion over an S200 column (C). (D) is a photograph of an SDS-PAGE gel showing which fractions had a predominance of monomer. FIG. 16 shows a photograph of SDS-PAGE characterization of purified MN-E6 scFv-Fc-mutant fusion proteins on a non-reducing gel, wherein the Fc portion that was fused to the MN-E6 scFv was either wild type (wt) or mutated by elimination of the hinge region, ‘DHinge’, of the Fc or elimination of the hinge region of the Fc and also bearing the Y407R mutation. All the Fc mutants favored monomer over dimer formation. The reference construct amino acid sequence for the indicated mutation is SEQ ID NO:273. Other relevant sequences are SEQ ID NOS:289 and 279. FIG. 17A and FIG. 17B show photograph of non-reducing SDS-PAGE characterization of large scale expression and purification of MN-E6 scFv-Fc hingeless mutant, showing that it is a monomer. FPLC characterization and purification of MN-E6 scFv-Fc hingeless mutant is shown (FIG. 17C). FIGS. 18A-18C show photographs of the SDS-PAGE characterization of the purified MN-C3 scFv-Fc fusion protein on a non-reducing gel (FIG. 18A) or a reducing gel (FIG. 18B). The protein was purified by size exclusion. The FPLC trace is shown (FIG. 18C). FIGS. 19A-19B show photographs of Native gels of MN-C3 or MN-E6 Fabs, scFv, scFv-Fc, wherein the Fc portion is wild type or mutants that prefer or are exclusively monomers. Native gels show that the Y407R Fc mutation (FIG. 19A) and the double mutant Y407R and a deleted hinge (FIG. 19B) favor monomer over dimer the best. Note that proteins are loaded onto a gel at much higher concentrations than typical use concentrations. The dimer formation of other Fc mutants may only reflect the fact that loading concentration is very high.

[0281] Some mutations or deletions were so effective that, even when loaded onto a gel at high concentrations, they resist dimer formation (FIGS. 14A, 14B). The Y407R mutation results in a nearly pure population of dimeric scFv-Fc (FIG. 10). Similarly deletions of the hinge region of the Fc result in fusion proteins that are monomers rather than dimers. Combinations of mutations can result in even more effective resistance of dimer formation (FIGS. 16 and 17). These and other mutations and combinations thereof were introduced into CH2-CH3 (SEQ ID NO:274 and 275) and CH3 (SEQ ID NO:276 and 277) fusion proteins such as scFv or in the hingeless Fc-fusion proteins such as scFv and were shown to eliminate or minimize dimerization.

[0282] Like the parent mouse monoclonal antibodies, human or humanized antibodies as well as single chain constructs, scFv's, scFv-Fc fusions or scFv-Fc-mutants specifically bind to the synthetic MUC1* peptides (FIGS. 20-22). FIG. 23 shows a graph of an ELISA assay that quantifies the binding of humanized MN-E6 scFv-Fc-delta hinge, aka Dhinge or hingeless, and humanized MN-E6 scFv to the MUC1* peptide PSMGFR.

[0283] The human or humanized anti-MUC1* antibody fragments described here specifically bind to MUC1 and MUC1* positive cancer cells. FIG. 24 shows photographs of immunofluorescence experiments in which humanized MN-C2 scFv or MN-E6 scFv specifically binds to MUC1* positive breast cancer cells in an identical concentration dependent manner. A-G: hu MN-C2 scFv binding to T47D breast cancer cells at concentrations indicated. H—N shows the fluorescently labeled scFv and DAPI. O-U: hu MN-E6 scFv binding to T47D breast cancer cells at concentrations indicated. V-B′ shows the fluorescently labeled scFv and DAPI. C′ is the secondary antibody control.

[0284] In addition to binding to MUC1* positive cancer cells, the anti-MUC1* antibody variable region fragments, scFv's, scFv-Fc's and scFv-Fc-mutants inhibited growth of MUC1-positive cancer cells. FIGS. 25A-25L show photographs of MUC1* positive breast cancer cells that have been cultured in normal medium or in the presence of humanized MN-E6 scFv. The photographs show killing and/or growth inhibition of MUC1* positive cells by MN-E6 scFv at 5 ug/mL and an even greater effect at 500 ug/mL. FIGS. 26A-26L show photographs of MUC1* positive breast cancer cells that have been cultured in normal medium or in the presence of humanized MN-E6 scFv-Fc Dhinge, which is a hingeless or delta hinge mutant. The photographs show killing and/or growth inhibition of MUC1* positive cells by hMN-E6 scFv-Fc Dhinge 5 ug/mL, an even greater effect at 50 μg/mL and yet an even greater effect at 100 ug/mL. FIG. 27 shows a graph of the image analysis of the fluorescent images of FIGS. 25 and 26. Image J was used to quantify the number of cells remaining after 96 hours treatment in humanized MN-E6scFv or MN-E6 scFv-Fc-delta hinge, aka Dhinge. The analysis software uses pixel counting and pixel fluorescence intensity to quantify the number of cells in each photograph. Analysis was performed over the entire image 512×512 pixels, 8-bit image. For comparison, the inhibition of mouse monoclonal MN-E6 Fab is also analyzed.

[0285] These data show that a human or humanized MN-E6 antibody or antibody fragment, Fab, MN-E6 scFv or hu MN-E6 scFv-FCₘᵤₜ are effective anti-cancer agents that can be administered to a person diagnosed with a MUC1 or MUC1* positive cancer, suspected of having a MUC1 or MUC1* positive cancer or is at risk of developing a MUC1 or MUC1* positive cancer.

[0286] In these specific examples, the dimer resistant Fc that was fused onto an antibody fragment or scFv is hu MN-E7 scFv. However, any of these Fc region mutations or combinations thereof that eliminate or minimize dimerization can be fused onto variable region fragments or single chain constructs of MN-E6, MN-C2, MN-C3 or MN-C8 or other antibodies identified that selectively bind to MUC1* as it exists on cancer cells or tissues. In addition, the Fabs of these antibodies can be used as an anti-cancer therapeutic. In one aspect of the invention, a person diagnosed with, suspected of having or is at risk of developing a MUC1* or MUC1 positive cancer is treated with an effective amount of human or humanized MN-E6 scFv, MN-C2 scFv, MN-C3 scFv, or MN-C8 scFv. In another aspect of the invention, a person diagnosed with, suspected of having or is at risk of developing a MUC1* or MUC1 positive cancer is treated with an effective amount of human or humanized MN-E6 scFv-FC_{Y407R}, MN-C2 scFv-Fc_{Y407R}, MN-C3 scFv-Fc_{Y407R}, or MN-C8 scFv-Fc_{Y407R}. In another aspect of the invention, a person diagnosed with, suspected of having or is at risk of developing a MUC1* or MUC1 positive cancer is treated with an effective amount of human or humanized MN-E6 scFv-Fc mutant_{Dhinge}, MN-C2 scFv-Fc mutant_{Dhinge}, MN-C3 scFv-Fc mutant_{Dhinge}, or MN-C8 scFv-Fc mutant_{Dhinge}. In yet another aspect of the invention, a person diagnosed with, suspected of having or is at risk of developing a MUC1* or MUC1 positive cancer is treated with an effective amount of human or humanized MN-E6 scFv-Fc mutant_{Y407R-Dhinge}, MN-C2 scFv-Fc mutant_{Y407R-Dhinge}, MN-C3 scFv-Fc mutant_{Y407R-Dhinge}, or MN-C8 scFv-Fc mutant_{Y407R-Dhinge}. One aspect of the invention is a method for treating a patient diagnosed with, suspected of having, or at risk of developing a MUC1 positive or MUC1* positive cancer, wherein the patient is administered an effective amount of a monomeric MN-E6 scFv, MN-C2 scFv, MN-C3 scFv, MN-C8 scFv, or MN-E6 scFv-Fc, MN-C2 scFv-Fc, MN-C3 scFv-Fc, MN-C8 scFv-Fc, wherein the Fc portion of the antibody-like protein has been mutated such that it resists dimer formation.

### Humanizing

[0287] Humanized antibodies or antibody fragments or fully human antibodies that bind to the extracellular domain of −MUC1* are preferred for therapeutic use. The techniques described herein for humanizing antibodies are but a few of a variety of methods known to those skilled in the art. The invention is not meant to be limited by the technique used to humanize the antibody.

[0288] Humanization is the process of replacing the non-human regions of a therapeutic antibody (usually mouse monoclonal antibody) by human one without changing its binding specificity and affinity. The main goal of humanization is to reduce immunogenicity of the therapeutic monoclonal antibody when administered to human. Three distinct types of humanization are possible. First, a chimeric antibody is made by replacing the non-human constant region of the antibody by the human constant region. Such antibody will contain the mouse Fab region and will contain about 80-90% of human sequence. Second, a humanized antibody is made by grafting of the mouse CDR regions (responsible of the binding specificity) onto the variable region of a human antibody, replacing the human CDR (CDR-grafting method). Such antibody will contain about 90-95% of human sequence. Third and last, a full human antibody (100% human sequence) can be created by phage display, where a library of human antibodies is screened to select antigen specific human antibody or by immunizing transgenic mice expressing human antibody.

[0289] A general technique for humanizing an antibody is practiced approximately as follows. Monoclonal antibodies are generated in a host animal, typically in mice. Monoclonal antibodies are then screened for affinity and specificity of binding to the target. Once a monoclonal antibody that has the desired effect and desired characteristics is identified, it is sequenced. The sequence of the animal-generated antibody is then aligned with the sequences of many human antibodies in order to find human antibodies with sequences that are the most homologous to the animal antibody. Biochemistry techniques are employed to paste together the human antibody sequences and the animal antibody sequences. Typically, the non-human CDRs are grafted into the human antibodies that have the highest homology to the non-human antibody. This process can generate many candidate humanized antibodies that need to be tested to identify which antibody or antibodies has the desired affinity and specificity.

[0290] Once a human antibody or a humanized antibody has been generated it can be further modified for use as an Fab fragment, as a full antibody, or as an antibody-like entity such as a single chain molecule containing the variable regions, such as scFv or an scFv-Fc. In some cases it is desirable to have Fc region of the antibody or antibody-like molecule mutated such that it does not dimerize.

[0291] In addition to methods that introduce human sequences into antibodies generated in non-human species, fully human antibodies can be obtained by screening human antibody libraries with a peptide fragment of an antigen. A fully human antibody that functions like MN-E6 or MN-C2 is generated by screening a human antibody library with a peptide having the sequence of the PSMGFR N-10 peptide. A fully human antibody that functions like MN-C3 or MN-C8 is generated by screening a human antibody library with a peptide having the sequence of the PSMGFR C-10 peptide.

[0292] Humanized anti-MUC1* antibodies were generated based on the sequences of the mouse monoclonal antibodies MN-E6, MN-C2, MN-C3 and MN-C8. In one aspect of the invention, a patient diagnosed with a MUC1* positive cancer is treated with an effective amount of humanized MN-E6, MN-C2, MN-C3 or MN-C8. In a preferred embodiment, a patient diagnosed with a MUC1* positive cancer is treated with an effective amount of humanized MN-E6 or MN-C2. In another aspect of the invention, a patient diagnosed with a MUC1* positive cancer is treated with an effective amount of humanized monovalent MN-E6, MN-C2, MN-C3 or MN-C8, wherein monovalent means the corresponding Fab fragment, the corresponding scFv or the corresponding scFv-Fc fusion. In a preferred embodiment, a patient diagnosed with a MUC1* positive cancer is treated with an effective amount of a humanized scFv or monomeric humanized scFv-Fc of MN-E6 or MN-C2. Since the MUC1* growth factor receptor is activated by ligand induced dimerization of its extracellular domain, and because the Fc portion of an antibody homo-dimerizes, it is preferable that a construct that includes an Fc portion uses a mutated Fc region that prevents or minimizes dimerization.

[0293] Antibodies that bind to PSMGFR (SEQ ID NO:2) peptide of the extracellular domain of the MUC1* receptor are potent anti-cancer therapeutics that are effective for the treatment or prevention of MUC1* positive cancers. They have been shown to inhibit the binding of activating ligands dimeric NME1 (SEQ ID NOS: 3 and 4) and NME7 (SEQ ID NOS: 5 and 6) to the extracellular domain of MUC1*. Anti-MUC1* antibodies that bind to the PSMGFR sequence inhibit the growth of MUC1*-positive cancer cells, specifically if they inhibit ligand-induced receptor dimerization. Fabs of anti-MUC1* antibodies have been demonstrated to block tumor growth in animals. Thus, antibodies or antibody fragments that bind to the extracellular domain of MUC1* would be beneficial for the treatment of cancers wherein the cancerous tissues express MUC1*.

[0294] Antibodies that bind to PSMGFR region of MUC1* or bind to a synthetic PSMGFR peptide are preferred. We have identified several monoclonal antibodies that bind to the extracellular domain of MUC1*. Among this group are mouse monoclonal antibodies MN-E6, MN-C2, MN-C3 and MN-C8, the variable regions of which were sequenced and are given as for MN-E6 SEQ ID NOS: 12-13 and 65-66, for MN-C2 SEQ ID NOS: 118-119 and 168-169, for MN-C3 SEQ ID NOS: 413-414 and 458-459 and for MN-C8 SEQ ID NOS: 505-506 and 543-554. The CDRs of these antibodies make up the recognition units of the antibodies and are the most important parts of the mouse antibody that should be retained when grafting into a human antibody. The sequences of the CDRs for each mouse monoclonal are as follows, heavy chain sequence followed by light chain: MN-E6 CDR1 (SEQ ID NO:16-17 and 69-70) CDR2 (SEQ ID NO:20-21 and 73-74) CDR3 (SEQ ID NO: 24-25 and 77-78), MN-C2 CDR1 (SEQ ID NO:122-123 and 172-173) CDR2 (SEQ ID NO:126-127 and 176-177) CDR3 (SEQ ID NO:130-131 and 180-181), MN-C3 CDR1 (SEQ ID NO:417-418 and 462-463) CDR2 (SEQ ID NO:421-422 and 466-467) CDR3 (SEQ ID NO:425-426 and 470-471), MN-C8 CDR1 (SEQ ID NO:507-508 and 545-546) CDR2 (SEQ ID NO:509-510 and 547-548) CDR3 (SEQ ID NO:511-512 and 549-550). In some cases, portions of the framework regions that by modeling are thought to be important for the 3-dimensional structure of the CDRs, are also imported from the mouse sequence.

[0295] Monoclonal antibodies MN-E6 and MN-C2 have greater affinity for MUC1* as it appears on cancer cells. Monoclonal antibodies MN-C3 and MN-C8 have greater affinity for MUC1* as it appears on stem cells. By sequence alignment the following human antibodies were chosen as being sufficiently homologous to the mouse antibody that substitution of the mouse CDRs would result in an antibody that retained ability to recognize the target. Mouse MN-E6 heavy chain variable region was homologous to human IGHV3-21*03 heavy chain variable region (SEQ ID NO: 26-27) and the light chain variable region was homologous to human IGKV3-11*02 light chain variable region (SEQ ID NO: 79-80). Mouse MN-C2 heavy chain variable region was homologous to human IGHV3-21*04 heavy chain variable region (SEQ ID NO: 132-133) and the light chain variable region was homologous to human IGKV7-3*01 light chain variable region (SEQ ID NO: 182-183). Mouse MN-C3 heavy chain variable region was homologous to human IGHV1-18*04 heavy chain variable region (SEQ ID NO: 427-428) and the light chain variable region was homologous to human IGKV2-29*03 light chain variable region (SEQ ID NO:472-473). Mouse MN-C8 heavy chain variable region was homologous to human IGHV3-21*04 heavy chain variable region (SEQ ID NO: 513-514) and the light chain variable region was homologous to human Z00023 light chain variable region (SEQ ID NO:551-552).

[0296] All four antibodies have been humanized, which process has resulted in several humanized forms of each antibody. CDRs derived from the variable regions of the mouse antibodies were biochemically grafted into a homologous human antibody variable region sequence. Humanized variable regions of MN-E6 (SEQ ID NOS: 38-39 and 93-94), MN-C2 (SEQ ID NOS: 144-145 and 194-195), MN-C3 (SEQ ID NOS: 439-440 and 486-487) and MN-C8 (SEQ ID NOS: 525-526 and 543-544) were generated by grafting the mouse CDRs into the variable region of a homologous human antibody. The humanized heavy chain variable constructs were then fused into constant regions of either human IgG1 heavy chain constant region (SEQ ID NOS:58-59) or human IgG2 heavy chain constant region (SEQ ID NO:54-55), which are then paired with either humanized light chain variable constructs fused to a human kappa chain (SEQ ID NO: 109-110) or human lambda chain (SEQ ID NO: 113-114) constant region. Other IgG isotypes could be used as constant region including IgG3 or IgG4.

[0297] Examples of humanized MN-E6 variable region into an IgG2 heavy chain (SEQ ID NOS:52-53) and into an IgG1 heavy chain (SEQ ID NOS:56-57), humanized MN-C2 variable into an IgG1 heavy chain (SEQ ID NOS: 158-159) or into an IgG2 heavy chain (SEQ ID NOS: 163-164) paired with either Lambda light chain (SEQ ID NO: 111-112 and 216-219) or Kappa chain (SEQ ID NO:107-108 and 210-213) and, humanized MN-C3 (SEQ ID NOS: 455-456, 453-454 and 500-501, 502-503) and MN-C8 (SEQ ID NOS: 541-542, 539-540 and 579-580, 581-582) antibodies were generated. Which IgG constant region is fused to the humanized variable region depends on the desired effect since each isotype has its own characteristic activity. The isotype of the human constant region is selected on the basis of things such as whether antibody dependent cell cytotoxicity (ADCC) or complement dependent cytotoxicity (CDC) is desired but can also depend on the yield of antibody that is generated in cell-based protein expression systems. In a preferred embodiment, humanized anti-MUC1* antibodies or antibody fragments are administered to a person diagnosed with or at risk of developing a MUC1-positive cancer.

[0298] One method for testing and selecting the humanized anti-MUC1* antibodies that would be most useful for the treatment of persons with cancer or at risk of developing cancers is to test them for their ability to inhibit the binding of activating ligands to the MUC1* extracellular domain. Dimeric NME1 can bind to and dimerize the MUC1* extracellular domain and in so doing stimulates cancer cell growth. Antibodies and antibody fragments that compete with NME1 for binding to the MUC1* extracellular domain are therefore anti-cancer agents. NME7 is another activating ligand of MUC1*. In some cases, it is preferable to identify antibodies that block the binding of NME7, or an NME7 truncation or cleavage product, to the MUC1* extracellular domain. Antibodies and antibody fragments that compete with NME7 and NME7 variants for binding to the MUC1* extracellular domain are effective as anti-cancer therapeutics. These antibodies include but are not limited to MN-E6, MN-C2, MN-C3, MN-C8 as well as single chain versions, such as scFv, of these antibodies and humanized version thereof. Other NME proteins also bind to MUC1 or MUC1* including NME6 and NME8. Antibodies that compete with these proteins for binding to MUC1* may also be useful as therapeutics. In a preferred embodiment, humanized anti-MUC1* antibodies or antibody fragments are administered to a person diagnosed with or at risk of developing a MUC1-positive cancer. In a more preferred embodiment, single chain antibody fragments, or monomeric scFv-Fc fusions, derived from humanized sequences of MN-E6 and MN-C2 are administered to a person diagnosed with or at risk of developing a MUC1-positive cancer.

[0299] Single chain variable fragments, scFv, or other forms that result in a monovalent antibody or antibody-like protein are also useful. In some cases it is desired to prevent dimerization of the MUC1* extracellular domain. Single chain variable fragments, Fabs and other monovalent antibody-like proteins have been shown to be effective in binding to the extracellular domain of MUC1* and blocking MUC1* dimerization. These single chain variable fragments, Fabs and other monovalent antibody-like molecules effectively blocked cancer growth in vitro and in animals xenografted with human MUC1-positive cancer cells. Thus, humanized single chain variable fragments or monovalent anti-MUC1* antibodies or antibody-like molecules would be very effective as an anti-cancer therapeutic. Such humanized single chain antibodies, Fabs and other monovalent antibody-like molecules that bind to the MUC1* extracellular domain or to a PSMGFR peptide are therefore useful as anti-cancer therapeutics. Anti-MUC1* single chain variable fragments are generated by grafting non-human CDRs of antibodies, which bind to extracellular domain of MUC1* or bind to PSMGFR peptide, into a framework of a homologous variable region human antibody. The resultant humanized heavy and light chain variable regions are then connected to each other via a suitable linker, wherein the linker should be flexible and of length that it allows heavy chain binding to light chain but discourages heavy chain of one molecule binding to the light chain of another. For example a linker of about 10-15 residues. Preferably, the linker includes [(Glycine)₄ (Serine)₁]₃ (SEQ ID NOS: 401-402), but is not limited to this sequence as other sequences are possible.

[0300] In one aspect, the humanized variable regions of MN-E6 (SEQ ID NOS: 38-39 and 93-94), MN-C2 (SEQ ID NOS: 144-145 and 194-195), MN-C3 (SEQ ID NOS: 439-440 and 486-487) and MN-C8 (SEQ ID NOS: 525-526 and 565-566) are biochemically grafted into a construct that connects heavy and light chains via a linker. Examples of humanized single chain anti-MUC1* antibodies comprising humanized sequences from the variable regions of MN-E6, MN-C2, MN-C3 and MN-C8 were generated. Several humanized MN-E6 single chain proteins were generated (SEQ ID NOS: 232-237). Several humanized MN-C2 single chain proteins were generated (SEQ ID NOS: 238-243). Several humanized MN-C3 single chain proteins were generated (SEQ ID NOS: 244-249). Several humanized MN-C8 single chain proteins were generated (SEQ ID NOS: 250-255). In a preferred embodiment, humanized anti-MUC1* antibody fragments, including variable fragments, scFv antibody fragments MN-E6 scFv, MN-C2 scFv, MN-C3 scFv, or MN-C8 scFv are administered to a person diagnosed with or at risk of developing a MUC1-positive cancer. In a more preferred embodiment, single chain antibody fragments, such as variable fragments derived from humanized sequences of MN-E6 and MN-C2, are administered to a person diagnosed with or at risk of developing a MUC1-positive cancer.

[0301] In another aspect, the humanized variable regions of MN-E6 (SEQ ID NOS: 38-39 and 93-94), MN-C2 (SEQ ID NOS: 144-145 and 194-195), MN-C3 (SEQ ID NOS: 439-440 and 486-487) and MN-C8 (SEQ ID NOS: 525-526 and 565-566) are biochemically grafted into a single chain variable fragment, scFv, that also contains an Fc portion of an antibody. Examples of humanized single chain variable fragment of MN-E6, MN-C2, MN-C3 and MN-C8 fused to a Fc region of an antibody were generated (SEQ ID NOS: 256-257, 260-261, 264-265 and 268-269). Inclusion of an Fc region serves several purposes. It increases the molecular weight of the antibody fragment, which slows degradation and increases half-life. An Fc region also recruits immune system complement to the tumor site. Additionally, the addition of an antibody Fc region makes the scFv a convenient diagnostic tool, as the secondary antibodies detect and label the Fc portion. However, the Fc portion homo-dimerizes. Thus an scFv-Fc would be bivalent and could dimerize and activate the MUC1* growth factor receptor. In order to get the benefits of having an Fc attached to an anti-MUC1* scFv, without the drawback of inducing MUC1* dimerization, the Fc region was mutated to minimize or eliminate Fc homo-dimerization. The following mutations were made in the CH3 domain to create a monomeric scFv-Fc fusion protein: Y407R (SEQ ID NOS: 278 and 279), F405Q (SEQ ID NOS: 280 and 281), T394D (SEQ ID NOS: 282 and 283), T366W/L368W (SEQ ID NOD: 284 and 285), T364R/L368R (SEQ ID NOS: 286 and 285). Any combinations of those mutations can be tested and could be introduced into Fc (SEQ ID NOS: 272-273), CH2-CH3 (SEQ ID NOS: 274-275) or CH3 (SEQ ID NOS: 276-277) fusion proteins or in the hingeless Fc-fusion proteins (SEQ ID NOS: 288-289).

[0302] One aspect of the invention is a method for treating a patient diagnosed with, suspected of having, or at risk of developing a MUC1 positive or MUC1* positive cancer, wherein the patient is administered an effective amount of a monomeric MN-E6 scFv, MN-C2 scFv, MN-C3 scFv, MN-C8 scFv, or MN-E6 scFv-Fc, MN-C2 scFv-Fc, MN-C3 scFv-Fc, MN-C8 scFv-Fc, wherein the antibody variable fragment portions are human or have been humanized and wherein the Fc portion of the antibody-like protein has been mutated such that it resists dimer formation.

### CAR T and Cancer Immunotherapy Techniques

[0303] In another aspect of the invention, some or all of the single chain portions of anti-MUC1* antibody fragments are biochemically fused onto immune system molecules, using several different chimeric antigen receptor, ‘CAR’ strategies. The idea is to fuse the recognition portion of an antibody, typically as a single chain variable fragment, to an immune system molecule that has a transmembrane domain and a cytoplasmic tail that is able to transmit signals that activate the immune system. The recognition unit can be an antibody fragment, a single chain variable fragment, scFv, or a peptide. In one aspect, the recognition portion of the extracellular domain of the CAR is comprised of sequences from the humanized variable region of MN-E6 (SEQ ID NOS: 38-39 and 93-94), MN-C2 (SEQ ID NOS: 144-145 and 194-195), MN-C3 (SEQ ID NOS: 439-440 and 486-487) and MN-C8 (SEQ ID NOS: 525-526 and 565-566). In another aspect, it is comprised of sequences from a single chain variable fragment. Examples of single chain constructs are given. Several humanized MN-E6 single chain proteins, scFv, were generated (SEQ ID NOS: 232-237). Several humanized MN-C2 single chain proteins, scFv, were generated (SEQ ID NOS: 238-243). Several humanized MN-C3 single chain proteins, scFv, were generated (SEQ ID NOS: 244-249). Several humanized MN-C8 single chain proteins, scFv, were generated (SEQ ID NOS: 250-255). The transmembrane region of the CAR can be derived from CD8, CD4, antibody domains or other transmembrane region, including the transmembrane region of the proximal cytoplasmic co-stimulatory domain, such as CD28, 4-1BB or other. The cytoplasmic tail of the CAR can be comprised of one or more motifs that signal immune system activation. This group of cytoplasmic signaling motifs, sometimes referred to as, co-stimulatory cytoplasmic domains, includes but is not limited to CD3-zeta, CD27, CD28, 4-1BB, OX40, CD30, CD40, ICAm-1, LFA-1, ICOS, CD2, CD5, CD7 and Fc receptor gamma domain. A minimal CAR may have the CD3-zeta or an Fc receptor gamma domain then one or two of the above domains in tandem on the cytoplasmic tail. In one aspect, the cytoplasmic tail comprises CD3-zeta, CD28, 4-1BB and/or OX40.

[0304] Table 1 lists many of the anti-MUC1* CARs that we generated and tested. Several examples of MN-E6 CARs were generated: CAR MN-E6 CD3z (SEQ ID NOS: 294-295); CAR MN-E6 CD28/CD3z (SEQ ID NOS: 297-298); CAR MN-E6 4-1BB/CD3z (SEQ ID NOS: 300-301); CAR MN-E6 OX40/CD3z (SEQ ID NOS: 616-617); CAR MN-E6 CD28/OX40/CD3z (SEQ ID NOS: 618-619); CAR MN-E6 CD28/4-1BB/CD3z (SEQ ID NOS: 303-304). Several examples of humanized MN-C2 CARs were generated: CAR MN-C2 CD3z (SEQ ID NOS: 606-607); CAR MN-C2 CD28/CD3z (SEQ ID NOS: 608-609); CAR MN-C2 4-1BB/CD3z (SEQ ID NOS: 610-611); CAR MN-C2 OX40/CD3z (SEQ ID NOS: 612-613); CAR MN-C2 CD28/4-1BB/CD3z (SEQ ID NOS: 306-307); CAR MN-C2 CD28/OX40/CD3z (SEQ ID NOS: 614-615). Humanized MN-C3 CAR was generated: CAR MN-C3 4-1BB/CD3z (SEQ ID NOS: 600-601).

[0305] Several examples of humanized MN-E6 CARs with different hinge regions (SEQ ID NOS:345-360) were generated: CAR MN-E6-Fc/8/41BB/CD3z (SEQ ID NOS:310-311); CAR MN-E6 FcH/8/41BB/CD3z (SEQ ID NOS:315-316); CAR MN-E6 Fc/4/41BB/CD3z (SEQ ID NOS:318-319); CAR MN-E6 FcH/4/41BB/CD3z (SEQ ID NOS:321-322); CAR MN-E6 IgD/8/41BB/CD3z (SEQ ID NOS:323-324); CAR MN-E6 IgD/4/41BB/CD3z (SEQ ID NOS:327-328); CAR MN-E6 X4/8/41BB/CD3z (SEQ ID NOS:330-331); CAR MN-E6 X4/4/41BB/CD3z (SEQ ID NOS:333-334); CAR MN-E6 8+4/4/41BB/CD3z (SEQ ID NOS:336-337). In addition, several humanized MN-C3 single chain variable fragment and humanized MN-C8 single chain variable fragments were also generated.

[0306] Several CARs were also generated and tested wherein the targeting head of the CAR was derived from the anti-MUC1* antibody MNC2. CAR MN-C2-Fc/41BB/CD3z (SEQ ID NOS:732-733); CAR-MN-C2 IgD/Fc/4-1BB/CD3z (SEQ ID NOS:734-735); CAR MN-C2 FcH/41BB/CD3z (SEQ ID NOS:736-737); CAR-MN-C2 IgD/FcH/4-1BB/CD3z (SEQ ID NOS:738-739); CAR MN-C2 IgD/41BB/CD3z (SEQ ID NOS:740-741); CAR MN-C2 X4/41BB/CD3z (SEQ ID NOS:742-743).

[0307] The extracellular domain recognition unit of a MUC1* targeting CAR can comprise variable regions of any non-human, humanized or human antibody that is able to bind to at least 12 contiguous amino acids of the PSMGFR peptide (SEQ ID NO:2). In one aspect, the MUC1* targeting portion of the CAR comprises variable regions from non-human, humanized or human MN-E6, MN-C2, MN-C3 or MN-C8. In one aspect, the extracellular domain recognition unit of a CAR is comprised essentially of a humanized MN-E6, MN-C2, MN-C3 or MN-C8 single chain variable fragment scFv. The transmembrane region of the CAR can be derived from CD8 (SEQ ID NOS:363-364), or can be the transmembrane domain of CD3-zeta, CD28, 41bb, OX40 or other transmembrane region (SEQ ID NOS:361-372) and the cytoplasmic domain of a CAR with antibody fragment targeting MUC1* extracellular domain can be comprised of one or more selected from the group comprising an immune system co-stimulatory cytoplasmic domain. The group of immune system co-stimulatory domains includes but is not limited to CD3-zeta, CD27, CD28, 4-1BB, OX40, CD30, CD40, ICAm-1, LFA-1, ICOS, CD2, CD5, CD7 and Fc receptor gamma domain (SEQ ID NOS:373-382). Alternatively, the recognition unit portion of a CAR can comprise a peptide wherein the peptide binds to the target. NME7 binds to and activates MUC1*. In one aspect of the invention, the recognition unit of a CAR is a peptide derived from NME7 (SEQ ID NOS: 5-6) or a peptide derived from NME7, including but not limited to NME7 peptide A1 (SEQ ID NO: 7), NME7 peptide A2 (SEQ ID NO: 8), NME7 peptide B1 (SEQ ID NO: 9), NME7 peptide B2 (SEQ ID NO: 10) and NME7 peptide B3 (SEQ ID NO: 11).

[0308] Some strategies for generating CARs include a portion of the molecule that dimerizes with itself. In some cases, dimerization of the target is not desirable. Therefore, CARs can be constructed such that they heterodimerize. In one case the recognition unit of the first CAR binds to a first target while the recognition unit of the second CAR binds to a second target. Both recognition units can be antibody fragments, both can be peptides or one can be an antibody fragment and the other a peptide. A first target of the CAR can be the extracellular domain of MUC1*. The recognition unit of the CAR would be comprised of an antibody fragment that binds to MUC1* extracellular domain or to a PSMGFR peptide. Alternatively, the recognition unit of the CAR would be comprised of a peptide that binds to MUC1* extracellular domain, such peptides include peptides derived from an NME protein such as NME1 or NME7, more particularly NME7 derived peptides listed as SEQ ID NOS: 7-11. A second target of a heterodimeric CAR may be a peptide or antibody fragment that binds to NME7. Alternatively, a second target of a heterodimeric CAR may be a peptide or antibody fragment that binds to PD1 or its cognate ligand PDL-1 or other target ligand of the target cancer cell. A second target may be a peptide or antibody fragment that binds to NME1 or NME7-AB. Because it is desirable to prevent dimerization of MUC1 induced by a CAR, heterodimeric CARs can be constructed so that only the extracellular domain of one molecule has an extracellular recognition unit that binds to a target (SEQ ID NOS:584-587). The other molecule can have a truncated extracellular domain that is devoid of a target recognition unit or antibody fragment (SEQ ID NOS:588-599).

[0309] The CARs described can be transfected or transduced into a cell of the immune system. In a preferred embodiment, a MUC1* targeting CAR is transfected or transduced into a T cell. In one aspect, the T cell is a CD3+/CD28+ T cell. In another case it is a dendritic cell. In another case it is a B cell. In another case it is a mast cell. The recipient cell can be from a patient or from a donor. If from a donor, it can be engineered to remove molecules that would trigger rejection. Cells transfected or transduced with a CAR of the invention can be expanded ex vivo or in vitro then administered to a patient. Administrative routes are chosen from a group containing but not limited to bone marrow transplant, intravenous injection, in situ injection or transplant. In a preferred embodiment, the MUC1* targeting CAR is administered to a person diagnosed with or at risk of developing a MUC1-positive cancer.

[0310] There are many possible anti-MUC1* CAR constructs that can be transduced into T cells or other immune cells for the treatment or prevention of MUC1* positive cancers. CARs are made up of modules and the identity of some of the modules is relatively unimportant, while the identity of other modules is critically important.

[0311] Our experiments demonstrate that the antibody recognition fragment at the outermost portion of the CAR is critically important because it targets the immune cell bearing the CAR to the tumor site. The intracellular signaling motifs are also very important but can be interchanged. FIG. 28 shows a schematic of the components of CAR and the various sequences that may be included in a CAR. Referring to FIG. 28,
[0312] R1 is: nothing; or
[0313] a ligand or a fragment of a ligand of a cancer associated antigen; or
[0314] a ligand or a fragment of a ligand of MUC1 or MUC1*; or
[0315] an antibody or antibody fragment wherein the antibody or antibody fragment binds to MUC1 or MUC1*; or an antibody or antibody fragment wherein the antibody or antibody fragment binds to PSMGFR*, wherein the antibody may be human or humanized; or an antibody or antibody fragment of MN-E6, MN-C2, MN-C3 or MN-C8 or humanized MN-E6, MN-C2, MN-C3 or MN-C8; or a single chain variable fragment of an antibody, scFv, that binds to a cleaved MUC1 or MUC1*; or a scFv of MN-E6, MN-C2, MN-C3 or MN-C8, which may be humanized; or a peptide that binds to MUC1* or PSMGFR peptide; or is an antibody fragment, a scFv, or a peptide that binds the PSMGFR portion of MUC1*; or is comprised of sequence from the humanized variable region of MN-E6 (SEQ ID NOS: 38-39 and 93-94), MN-C2 (SEQ ID NOS: 144-145 and 194-195), MN-C3 (SEQ ID NOS: 439-440 and 486-487) and MN-C8 (SEQ ID NOS: 525-526 and 565-566). In one aspect, R1 is a scFv that binds the PSMGFR portion of MUC1* comprised of sequence from humanized MN-E6 scFv (SEQ ID NOS: 232-237), humanized MN-C2 scFv (SEQ ID NOS: 238-243), humanized MN-C3 scFv (SEQ ID NOS: 244-249) or humanized MN-C8 scFv (SEQ ID NOS: 250-255). In another aspect, RI is a scFv that binds the PSMGFR portion of MUC1* comprised of sequence from humanized MN-E6 scFv (SEQ ID NOS: 232-237) or humanized MN-C2 scFv (SEQ ID NOS: 238-243). In one example RI is a scFv that binds the PSMGFR portion of MUC1* comprised of sequence from humanized MN-E6 scFv (SEQ ID NOS: 232-237)
[0316] R2 is a polypeptide flexible linker that connects the recognition portion to the transmembrane domain of the CAR. In one aspect, R2 can be a polypeptide linker of different length from 5 to 250 amino acids. In another aspect, R2 is a polypeptide linker of human origin. In one aspect, R2 can be made of or a modification of the Fc region of a human immunoglobulin (IgG, IgA, IgE, IgM or IgD). I another aspect, R2 can be the hinge region or a modification of the hinge region of a human immunoglobulin (IgG, IgA, IgE, IgM or IgD). In one aspect, R2 can be the hinge region or a modification of the hinge region of a T-cell receptor (CD8a, CD28 or CD4). In one example, R2 is the hinge region of CD8a, the hinge region of human IgD or the Fc domain of human IgG1.
[0317] R3 is a transmembrane domain. In one aspect, R3 can be a transmembrane domain or a modification of a transmembrane domain of any transmembrane human proteins. In another aspect, R3 can be a transmembrane domain or a modification of a transmembrane domain from human cell receptor. In one aspect, R3 can be a transmembrane domain or a modification of a transmembrane domain of a T-cell receptor (CD8a, CD4, CD28, CD3z, OX40 or 41-BB). In another aspect, R3 is a transmembrane domain from the first cytoplasmic co-stimulatory domain of the CAR. In one aspect, R3 can be a transmembrane domain or a modification of a transmembrane domain of a T-cell receptor extended with 1,2,3,4 or 5 amino acids of the cytoplasmic domain associated to the transmembrane domain. In another aspect, R3 can be a transmembrane domain or a modification of a transmembrane domain of a T-cell receptor extended with 1,2,3,4 or five amino acids of the cytoplasmic domain associated to the transmembrane domain followed by a cystein for disulfide bond formation. In one example, R3 is the transmembrane domain of CD8a or CD4.
[0318] R4 is a signaling domain from a T-cell receptor. In one aspect, R4 can be the cytoplasmic signaling domain of CD3-zeta, CD27, CD28, 4-1BB, OX40, CD30, CD40, ICAm-1, LFA-1, ICOS, CD2, CD5, CD7 and Fc receptor gamma domain. In one example, R4 is the cytoplasmic domain of CD3-zeta. Several examples of humanized CAR with single signaling domain (CAR I) were regenerated: CAR MN-E6 CD3z (SEQ ID NOS: 294-295); CAR MN-C2 CD3z (SEQ ID NOS: 606-607)
[0319] R5 is a co-stimulatory domain from a T-cell receptor. In one aspect, R5 can be the cytoplasmic signaling domain of CD27, CD28, 4-1BB, OX40, CD30, CD40, ICAm-1, LFA-1, ICOS, CD2, CD5, CD7 and Fc receptor gamma domain. R5 will be different from R4 and R6. In one example, R5 is the cytoplasmic domain of CD28, 4-1BB or OX40. Several examples of humanized CAR with two signaling domain (CAR II) were regenerated: CAR MN-E6 CD28/CD3z (SEQ ID NOS: 297-298); CAR MN-E6 4-1BB/CD3z (SEQ ID NOS: 300-301); CAR MN-E6 OX40/CD3z (SEQ ID NOS: 616-617); CAR MN-C2 CD28/CD3z (SEQ ID NOS: 608-609); CAR MN-C2 4-1BB/CD3z (SEQ ID NOS: 610-611); CAR MN-C2 OX40/CD3z (SEQ ID NOS: 612-613); MN-C3 4-1BB/CD3z (SEQ ID NOS: 600-601); CAR MN-E6-Fc/8/41BB/CD3z (SEQ ID NOS:310-311); CAR MN-E6 FcH/8/41BB/CD3z (SEQ ID NOS:315-316); CAR MN-E6 Fc/4/41BB/CD3z (SEQ ID NOS:318-319); CAR MN-E6 FcH/4/41BB/CD3z (SEQ ID NOS:321-322); CAR MN-E6 IgD/8/41BB/CD3z (SEQ ID NOS:323-324); CAR MN-E6 IgD/4/41BB/CD3z (SEQ ID NOS:327-328); CAR MN-E6 X4/8/41BB/CD3z (SEQ ID NOS:330-331); CAR MN-E6 X4/4/41BB/CD3z (SEQ ID NOS:333-334); CAR MN-E6 8+4/4/41BB/CD3z (SEQ ID NOS:336-337).
[0320] R6 is a co-stimulatory domain from a T-cell receptor. In one aspect, R6 can be the cytoplasmic signaling domain of CD27, CD28, 4-1BB, OX40, CD30, CD40, ICAm-1, LFA-1, ICOS, CD2, CD5, CD7 and Fc receptor gamma domain. R6 will be different from R4 and R5. In one example, R5 is the cytoplasmic domain of CD28. Several examples of humanized CAR with two signaling domain (CAR III) were regenerated: CAR MN-E6 CD28/OX40/CD3z (SEQ ID NOS: 618-619); CAR MN-E6 CD28/4-1BB/CD3z (SEQ ID NOS: 303-304); CAR MN-C2 CD28/4-1BB/CD3z (SEQ ID NOS: 306-307); CAR MN-C2 CD28/OX40/CD3z (SEQ ID NOS: 614-615)

[0321] We and others have shown that intracellular signaling modules, such as CD3-zeta (SEQ ID NOS: 373-376), CD28 (SEQ ID NOS: 377-378) and 41BB (SEQ ID NOS: 379-380), alone or in combinations stimulate immune cell expansion, cytokine secretion and immune cell mediated killing of the targeted tumor cells (Pule M A, Straathof K C, Dotti G, Heslop H E, Rooney C M and Brenner M K (2005) A chimeric T cell antigen receptor that augments cytokine release and supports clonal expansion of primary human T cells. Mol Ther. 12(5): 933-941; Hombach A A, Heiders J, Foppe M, Chmielewski M and Abken H. (2012) OX40 costimulation by a chimeric antigen receptor abrogates CD28 and IL-2 induced IL-10 secretion by redirected CD4(+) T cells. Oncoimmunology. 1(4):458-466; Kowolik C M, Topp M S, Gonzalez S, Pfeiffer T, Olivares S, Gonzalez N, Smith D D, Forman S J, Jensen M C and Cooper L J. (2006) CD28 costimulation provided through a CD19-specific chimeric antigen receptor enhances in vivo persistence and antitumor efficacy of adoptively transferred T cells. Cancer Res. 66(22): 10995-11004; Loskog A, Giandomenico V, Rossig C, Pule M, Dotti G and Brenner M K. (2006) Addition of the CD28 signaling domain to chimeric T-cell receptors enhances chimeric T-cell resistance to T regulatory cells. Leukemia. 20(10): 1819-1828; Milone M C, Fish J D, Carpenito C, Carroll R G, Binder G K, Teachey D, Samanta M, Lakhal M, Gloss B, Danet-Desnoyers G, Campana D, Riley J L, Grupp S A and June C H. (2009) Chimeric receptors containing CD137 signal transduction domains mediate enhanced survival of T cells and increased antileukemic efficacy in vivo. Mol Ther. 17(8): 1453-1464; Song D G, Ye Q, Carpenito C, Poussin M, Wang L P, Ji C, Figini M, June C H, Coukos G, Powell D J Jr. (2011) In vivo persistence, tumor localization, and antitumor activity of CAR-engineered T cells is enhanced by costimulatory signaling through CD137 (4-1BB). Cancer Res. 71(13):4617-4627). Less important is the identity of the short extracellular piece that presents the antibody fragment, the transmembrane domain, and the short cytoplasmic tail that comes before the intracellular signaling motifs.

[0322] The identity of the recognition antibody fragment that targets the CAR to a tumor is critically important. For the treatment of MUC1 positive or MUC1* positive cancers, that antibody recognition fragment must bind to the extracellular domain of portion of MUC1 that remains after cleavage and shedding of the bulk of the extracellular domain, which contains the tandem repeat domains. In one aspect of the invention, the portion that remains comprises the PSMGFR sequence. In another aspect of the invention, the portion of MUC1 that remains after cleavage and shedding contains the PSMGFR sequence plus up to nine (9) more amino acids extended at the N-terminus. In another aspect of the invention, the portion of MUC1 that remains after cleavage and shedding contains the PSMGFR sequence plus up to twenty one (21) more amino acids extended at the N-terminus. In one aspect, the antibody recognition fragment binds to at least twelve contiguous amino acids of a PSMGFR peptide. In another aspect of the invention, the antibody recognition fragment binds to a peptide comprising the sequence SNIKFRPGSVVVQLTLAFREGTINVHDVETQFNQYKTEAASRY (SEQ ID NO:620); or SVVVQLTLAFREGTINVHDVETQFNQYKTEAASRY (SEQ ID NO:621).

[0323] As a demonstration, a single chain antibody fragment that included the variable domain of the monoclonal anti-MUC1* antibodies called MN-E6 or MN-C2 were engineered into a panel of CARs (Table 1). The MUC1* targeting CARs were then transduced, separately or in combinations, into immune cells. When challenged with surfaces presenting a MUC1* peptide, an antigen presenting cell transfected with MUC1*, or MUC1* positive cancer cells, the immune cells that were transduced with MUC1* targeting CARs elicited immune responses, including cytokine release, killing of the targeted cells and expansion of the immune cells (Table 2).

[0324] In one case, human Jurkhat cells were transduced with MUC1*-targeting CARs and upon exposure to a surface presenting the PSMGFR peptide, K562 antigen presenting cells that had been transfected with MUC1* or MUC1* positive cancer cells, the Jurkhat cells secreted IL-2. In another case, purified human T cells were transduced with MUC1*-targeting CARs and upon exposure to a surface presenting the PSMGFR peptide, K562 antigen presenting cells that had been transfected with MUC1* or MUC1* positive cancer cells, the T cells secreted IL-2, interferon gamma, and killed the targeted antigen presenting cells and cancer cells, while the T cells expanded. As demonstrated, CARs that comprise an antibody fragment, wherein the antibody fragment is able to bind to the PSMGFR peptide, a transmembrane domain and a cytoplasmic tail bearing co-stimulatory domains, elicit an immune system anti-tumor cell response when said CARs are transduced into immune cells, which include T cells. Therefore, other antibodies, antibody fragments or antibody mimics that are able to bind to the PSMGFR peptide will perform similarly and can be used to treat or prevent cancers. Those skilled in the art will recognize that there are a number of technologies available for transfecting or transducing cells with CARs and the invention is not limited by the method used for making the immune cell express a MUC1*-targeting CAR.

[0325] For example, the gene encoding the CARs and activated T cell induced genes described herein can be virally transduced into an immune cell using viruses, which may or may not result in the CAR gene being integrated into the genome of the recipient cell. Virus delivery systems and viral vectors including but not limited to retroviruses, including gamma-retroviruses, lentivirus, adenoviruses, adeno-associated viruses, baculoviruses, poxvirus, herpes simplex viruses, oncolytic viruses, HF10, T-Vec and the like can be used. In addition to viral transduction, CARs and activated T cell induced genes described herein can be directly spliced into the genome of the recipient cell using methods such as CRISPR technology, CRISPR-Cas9 and -CPF1, TALEN, Sleeping Beauty transposon system, and SB 100×.

[0326] Similarly, the identity of molecules that make up the non-targeting portions of the CAR such as the extracellular domain, transmembrane domain and membrane proximal portion of the cytoplasmic domain, are not essential to the function of a MUC1*-targeting CAR. For example, the extracellular domain, transmembrane domain and membrane proximal portion of the cytoplasmic domain can be comprised of portions of CD8, CD4, CD28, or generic antibody domains such as Fc, CH2CH3, or CH3. Further, the non-targeting portions of a CAR can be a composite of portions of one or more of these molecules or other family members.

[0327] One aspect of the invention is a method for treating a patient diagnosed with, suspected of having, or at risk of developing a MUC1 positive or MUC1* positive cancer, wherein the patient is administered an effective amount of immune cells that have been transduced with a MUC1* targeting CAR. In another aspect of the invention, the immune cells are T cells isolated from a patient, which are then transduced with CARs wherein the targeting head of the CAR binds to MUC1*, and after expansion of transduced T cells, the CAR T cells are administered in an effective amount to the patient. In yet another aspect of the invention, the immune cells are T cells isolated from a patient, which are then transduced with CARs wherein the targeting head of the CAR comprises portions of huMN-E6, huMN-C2, huMN-C3 or huMN-C8, and after optional expansion of transduced T cells, the CAR T cells are administered in an effective amount to the patient. In yet another aspect of the invention, the CAR that is transduced into the immune cell and administered to the patient diagnosed with a MUC1 or MUC1* positive cancer is chosen from the list of CARs in Table 1 or Table 2.

### Specifics of CARs Made and Tested

[0328] Many MUC1* targeting CARs were generated wherein the targeting antibody fragment at the distal end of the CAR was either MN-E6, MN-C2, MN-C3 or MN-C8. The DNA of each CAR was sequenced to verify that cloning was correctly done. Each construct was then shuffled into an expression plasmid, transfected into cells and then verified that the construct had successfully inserted by Western blot. Surface expression was verified by FACS. The MUC1* targeting CARs were then virally transduced into immune cells. In one aspect, they were transduced into Jurkat cells. In another aspect, they were transduced into primary human T cells that were purified from blood. A series of functional assays were performed and verified that the CARs were functional. Functional assays showed that both Jurkat cells and primary T cells transduced with MUC1* targeting CAR secreted the cytokine IL-2 and interferon gamma (IFN-g) when challenged with cells or surfaces presenting MUC1*. Table 1 lists the CARs that were made and tested. Table 2 lists cytokine release data for some of the CARs after transduction into human T cells and co-culture with a variety of cancer cells. FIG. 29 is a graph of an experiment measuring IL-2 cytokine secretion by Jurkat cells that were transduced with a panel of CARs, including MN-E6 CD8/CD3z, MN-E6 CD8/CD28/CD3z, MN-E6 CD8/41BB/CD3z, MN-E6 CD4/CD28/CD3z and MN-E6 CD4/CD28/41BB/CD3z. IL-2 was secreted only when the CAR Jurkat cells were exposed to K562-wt cells or K562 cells that had been transfected with MUC1*. It should be noted that the parent K562-wt cells express very low levels of MUC1*. Another group of CARs transfected into Jurkat cells was similarly tested for cytokine secretion. FIG. 30 shows IL-2 secretion by Jurkat T cells that were transduced with MN-E6 CD8/CD28/CD3z, MN-E6 CD8/41BB/CD3z, MN-E6 CD4/CD28/CD3z or MN-E6 CD4/41BB/CD3z, when the CAR T cells were exposed to K562-wt cells or K562 cells that had been transfected with MUC1*. Similarly, FIG. 31 shows IL-2 cytokine secretion by primary human T cells that were transduced with MN-E6 CD8/CD28/CD3z, MN-E6 CD8/41BB/CD3z or MN-E6 CD4/41BB/CD3z. Cytokine secretion only occurred when the MUC1* targeting CAR T cells were exposed to K562-wt cells or K562 cells that had been transfected with MUC1*. Another cytokine that is secreted by activated T cells when they see a target cell is interferon-gamma (IFN-g). FIG. 32 shows that interferon-gamma was secreted by primary human T cells that were transduced with a panel of CARs, including MN-E6 CD8/CD28/CD3z and MN-E6 CD4/41BB/CD3z, when the CAR T cells were exposed to K562-wt cells or K562 cells that had been transfected with MUC1*. Interferon-gamma was similarly secreted by primary human T cells that were transduced with a panel of CARS, including MN-E6 CD8/CD28/CD3z, MN-E6 CD8/41BB/CD3z and MN-E6 CD8/CD28/41BB/CD3z, when the MUC1* targeting CAR T cells were exposed to K562-wt cells, K562 cells that had been transfected with MUC1*, or MUC1* positive cancer cells of prostate cancer (DU145), breast cancer (1500) or pancreatic cancer (Capan) (FIG. 33).

[0329] Another measure of function of CAR T cells is whether or not they induce killing of the targeted cells. T cells transfected with a variety of CARs comprising antibody fragments that bind to the PSMGFR sequence of MUC1* killed MUC1* expressing cells in co-culture assays. In one assay, target MUC1* expressing cells are incubated with calcein. When they are mixed with CAR T cells wherein the CAR comprises an antibody fragment such as MN-E6, MN-C2, MN-C3 or MN-C8 the CAR T cells kill the MUC1* presenting cells which causes the target cells to lyse and releases calcein into the supernatant. FIG. 34 is a graph of an experiment measuring target cell death when primary human T cells, isolated from a blood sample, that were transduced with a panel of CARS, including MN-E6 CD8/CD28/CD3z, MN-E6 CD8/41BB/CD3z and MN-E6 CD4/41BB/CD3z, when the CAR T cells were exposed to K562-wt cells or K562 cells that had been transfected with MUC1*. The ratio of T cells to target cells was 1:1 and the cells were co-cultured for 24 hours. FIGS. 35A-35B are graphs of FACS measuring a time course of target cell survival from Day 1 to Day 3. Primary human T cells, isolated from a blood sample, were transduced with a panel of CARS, including humanized MN-E6-CD8-3z, MN-E6-CD8-CD28-3z, MN-E6-CD8-41BB-3z and MN-E6-CD8-CD28-41BB-3z. The CAR T cells were then exposed to K562-wt cells that naturally express low levels of MUC1*, or K562 cells that had been transfected with MUC1* high. The ratio of MUC1* targeting CAR T cells to target cells was either 1:1, 10:1, or 20:1. Surviving cells were detected and measured at Day 1 or Day 3.

[0330] FIG. 36 is a graph of FACS measurements of target cell survival at Day 3 of co-culture experiment. Primary human T cells were transduced with a panel of CARs, including humanized MN-E6-CD8-3z, MN-E6-CD8-CD28-3z, MN-E6-CD8-41BB-3z and MN-E6-CD8-CD28-41BB-3z. The CAR T cells were then exposed to MUC1* positive T47D breast cancer cells or MUC1* positive 1500 aka ZR-75-1 breast cancer cells. The ratio of MUC1* targeting CAR T cells to target cells was either 1:1 or 10:1. As can be seen from the graph, T cells transduced with a MUC1* targeting CAR have a much greater killing effect on MUC1* cancer cells than the untransduced control T cells. In addition, the killing effect is much greater when the ratio of T cells: target cells is increased. FIG. 37 is a graph of FACS measurements of target cell survival at Day 1 of co-culture experiment. Primary human T cells were transduced with a panel of CARs, including humanized MN-E6-CD8-41BB-3z, MN-E6-CD4-41BB-3z, and MN-E6-CD8-CD28-41BB-3z. The CAR T cells were then exposed to the following MUC1* positive cancer cells: T47D breast cancer; capan2 pancreatic cancer; or DU-145 prostate cancer. The ratio of MUC1* targeting CAR T cells to target cells was 5:1. As can be seen from the graph, T cells transduced with a MUC1* targeting CAR have a much greater killing effect on MUC1* cancer cells than the untransduced control T cells. Note that the measurements were taken after 24 hours with only a 5:1 T cell to target cell ratio. Also note that MUC1* targeting CARs that have a CD4 extracellular domain-transmembrane-cytoplasmic tail work equally well as CD8 constructs.

[0331] FIG. 38 is a graph of FACS measurements of target cell survival at Day 3 of co-culture experiment. Primary human T cells were transduced with a panel of CARs, including humanized MN-E6-CD8-41BB-3z, MN-E6-CD4-41BB-3z, and MN-E6-CD8-CD28-41BB-3z. The CAR T cells were then exposed to the following MUC1* positive cancer cells: K562 leukemia cells transfected with MUC1*; T47D breast cancer; 1500 aka ZR-75-1 breast cancer cells; or CAPAN-2 pancreatic cancer cells. In addition to the untransduced T cell controls, the assay was performed on PC3 MUC1* negative prostate cancer cells. The ratio of MUC1* targeting CAR T cells to target cells was 1:1. As can be seen from the graph, T cells transduced with a MUC1* targeting CAR have a much greater killing effect on MUC1* cancer cells than the untransduced control T cells. In addition, the killing effect is specific for MUC1* positive cells. Note that MUC1* targeting CARs that have a CD4 extracellular domain-transmembrane-cytoplasmic tail work equally well as CD8 constructs. FIG. 39 is a graph of FACS measurements of CAR T cell expansion over 24 hours in co-culture with target cells at a ratio of 5:1 CAR T cells to target cells. The primary human T cells were transduced with a panel of CARs, including humanized MN-E6-CD8-41BB-3z, MN-E6-CD4-41BB-3z, and MN-E6-CD8-CD28-41BB-3z. The CAR T cells were co-cultured with MUC1* positive T47D breast cancer cells, MUC1* positive Capan pancreatic cancer cells, and MUC1-negative cells HCT-116 colon cancer cells and HEK-293 human embryonic kidney cells. As can be seen from the graph, the CAR T population is increased in the presence of MUC1* positive cells. FIG. 40 shows a photograph of a Western blot of MUC1* targeting CARs. From 1 to 9 are: 1. MN-E6scFv-Fc-8-41BB-CD3z (Human Fc as hinge region with CD8 TM); 2: MN-E6scFv-FcH-8-41BB-CD3z (Human Fc hingeless as hinge region with CD8 TM); 3: MN-E6scFv-Fc-4-41BB-CD3z (Human Fc as hinge region with CD4 TM); 4: MN-E6scFv-FcH-4-41BB-CD3z (Human Fc as hingeless hinge region with CD4 TM); 5: MN-E6scFv-IgD-8-41BB-CD3z (hinge region from human IgD with CD8 TM); 6: MN-E6scFv-IgD-4-41BB-CD3z (hinge region from human IgD with CD4 TM); 7: MN-E6scFv-X4-8-41BB-CD3z (Long flexible linker as hinge region with CD8 TM); 8: MN-E6scFv-X4-4-41BB-CD3z (Long flexible linker as hinge region with CD4 TM); 9: MN-E6scFv-8-4-41BB-CD3z (Hinge region from CD8 and CD4 a with CD4 TM).

[0332] FIG. 41 shows graphs of FACS scans of T47D breast cancer cells co-cultured with human T cells that were transduced with MN-E6scFv-Fc-8-41BB-CD3z, MN-E6scFv-FcH-8-41BB-CD3z (hingeless), MN-E6scFv-Fc-4-41BB-CD3z, MN-E6scFv-IgD-8-41BB-CD3z, MN-E6scFv-X4-8-41BB-CD3z and MN-E6scFv-X4-4-41BB-CD3z. T cells and cancer cells were co-cultured at a 1:1 ratio for 48 hours. T cell counts were normalized to an average of all untransduced T cells and target cells were normalized to each specific cell type when co-cultured with untransduced T cells. The graph shows that when the CAR T cells are co-cultured with MUC1* positive cancer cells, the T cell population expands and the targeted cancer cell population decreases.

[0333] FIG. 42 shows graphs of FACS scans of T47D breast cancer cells, Capan-2 pancreatic cancer cells, K562-MUC1* transfected cells, and K562-wt cells that were co-cultured with human T cells that were transduced with MN-E6scFv-Fc-8-41BB-CD3z, MN-E6scFv-FcH-8-41BB-CD3z, MN-E6scFv-Fc-4-41BB-CD3z, MN-E6scFv-IgD-8-41BB-CD3z, MN-E6scFv-X4-8-41BB-CD3z and MN-E6scFv-X4-4-41BB-CD3z. T cells and cancer cells were co-cultured at a 1:1 ratio for 48 hours. T cell counts were normalized to an average of all untransduced T cells and target cells were normalized to each specific cell type when co-cultured with untransduced T cells. The graph shows that when the CAR T cells are co-cultured with MUC1* positive cancer cells, the T cell population expands and the targeted cancer cell population decreases.

### Specificity of Anti-MUC1* Targeting Antibodies

[0334] As these experiments demonstrate, the critical portion of a CAR is the antibody fragment that directs the immune cell to the tumor cell. As we will show in the following section, MN-E6 and MN-C2 are specific for the form of MUC1* that is expressed on tumor cells. The next most important part of a CAR is the cytoplasmic tail bearing immune system co-stimulatory domains. The identity of these domains modulates the degree of immune response but does not affect the specificity. As shown, the identity of the transmembrane portion of a CAR is the least important. It appears that as long as the transmembrane portion has some flexibility and is long enough to allow the antibody fragment to reach its cognate receptor on the tumor cell, it will suffice. This is demonstrated in FIGS. 40-42. CARs comprising the MN-E6 targeting antibody fragment, and intracellular co-stimulatory domains 41BB and CD3-zeta but having a variety of different extracellular, transmembrane and short cytoplasmic tail all worked in that they specifically killed the targeted cells while stimulating the expansion of the host T cells.

[0335] The most accurate way of demonstrating antibody specificity is testing the antibody on normal human tissue specimens compared to cancerous tissue specimens. MN-C2 and MN-E6 were shown to specifically bind to MUC1 or MUC1* positive cancer cells. Several breast tumor arrays were assayed using several anti-MUC1 or MUC1* antibodies. Essentially the studies involving serial sections of breast cancer tissue specimens from over 1,200 different breast cancer patients showed that very little full-length MUC1 remains on breast cancer tissues. The vast majority of the MUC1 expressed is MUC1* and is stained by MN-C2. The analysis was performed by Clarient Diagnostics and tissue staining was scored using the Allred method. For example, FIG. 43 shows serial sections of breast cancer tissue arrays that were stained with either VU4H5, a commercially available anti-MUC1 antibody that binds to the tandem repeats, or MN-C2 that binds to MUC1*. FIGS. 43 and 44 are photographs of breast cancer tissue arrays stained with either VU4H5 which recognizes MUC1-FL (full length) or MN-C2 which recognizes cancerous MUC1*. Tissue staining was scored using Allred scoring method which combines an intensity score and a distribution score. Below the photographs of the tissue arrays are color-coded graphs displaying the results. As can be seen, the arrays stained with VU4H5 are very light and many tissues do not stain at all despite the published reports that MUC1 is aberrantly expressed on over 96% of all breast cancers as evidenced by nucleic acid based diagnostics. In contrast, the arrays stained with MN-C2 are very dark (red versus yellow or white in graph). Additionally, many tissues did not stain at all with anti-full-length MUC1 but stained very dark with MN-C2, (see green boxes in graph). Similarly, we stained normal or cancerous breast tissues with humanized MN-E6 scFv-Fc. The antibody fragment was biotinylated so it could be visualized by a secondary streptavidin based secondary. As can be seen in FIG. 45, hMN-E6 scFv-Fc does not stain normal breast tissue but stains cancerous breast tissue. Further, the intensity and homogeneity of staining increases with tumor grade and/or metastatic grade of the patient (FIGS. 45-46). Similarly, hMN-E6 scFv-Fc did not stain normal lung tissue but did stain lung cancer tissue (FIGS. 47-51) and the intensity and distribution of staining increased as tumor grade or metastatic grade increased. FIG. 52 shows photographs of normal small intestine and cancerous small intestine tissues stained with humanized MN-E6-scFv-Fc biotinylated anti-MUC1* antibody at 5 ug/mL, then stained with a secondary streptavidin HRP antibody. A) is a normal small intestine tissue. B) is small intestine cancer from patient as denoted in the figure. C,D are photographs of the corresponding serial sections that were stained with the secondary antibody alone. FIG. 53 shows photographs of normal small intestine tissues stained with humanized MN-E6-scFv-Fc anti-MUC1* antibody at 50 μg/mL, then stained with a secondary goat-anti-human HRP antibody. A-D are normal small intestine tissue. E-H are photographs of the corresponding serial sections that were stained with the secondary antibody alone. FIG. 54 shows photographs of cancerous small intestine tissues stained with humanized MN-E6-scFv-Fc anti-MUC1* antibody at 50 μg/mL, then stained with a secondary goat-anti-human HRP antibody. A-D are cancerous small intestine tissue from a patient as denoted in figure. E-H are photographs of the corresponding serial sections that were stained with the secondary antibody alone. FIG. 55 shows photographs of cancerous small intestine tissues stained with humanized MN-E6-scFv-Fc anti-MUC1* antibody at 50 μg/mL, then stained with a secondary goat-anti-human HRP antibody. A-D are cancerous small intestine tissue from a patient as denoted in figure. E-H are photographs of the corresponding serial sections that were stained with the secondary antibody alone. FIG. 56 shows photographs of normal colon tissues stained with humanized MN-E6-scFv-Fc anti-MUC1* antibody at 50 μg/mL, then stained with a secondary goat-anti-human HRP antibody. A-D are normal colon. E-H are photographs of the corresponding serial sections that were stained with the secondary antibody alone. FIG. 57 shows photographs of colon cancer tissues stained with humanized MN-E6-scFv-Fc anti-MUC1* antibody at 50 μg/mL, then stained with a secondary goat-anti-human HRP antibody. A-D are colon cancer tissue from a metastatic patient as denoted in figure. E-H are photographs of the corresponding serial sections that were stained with the secondary antibody alone. FIG. 58 shows photographs of colon cancer tissues stained with humanized MN-E6-scFv-Fc anti-MUC1* antibody at 50 μg/mL, then stained with a secondary goat-anti-human HRP antibody. A-D are colon cancer tissue from a Grade 2 patient as denoted in figure. E-H are photographs of the corresponding serial sections that were stained with the secondary antibody alone. FIG. 59 shows photographs of colon cancer tissues stained with humanized MN-E6-scFv-Fc anti-MUC1* antibody at 50 μg/mL, then stained with a secondary goat-anti-human HRP antibody. A-D are colon cancer tissue from a metastatic patient as denoted in figure. E-H are photographs of the corresponding serial sections that were stained with the secondary antibody alone. FIG. 60 shows photographs of prostate cancer tissues stained with humanized MN-E6-scFv-Fc anti-MUC1* antibody at 50 μg/mL, then stained with a secondary goat-anti-human HRP antibody. A-D are prostate cancer tissue from a patient as denoted in figure. E-H are photographs of the corresponding serial sections that were stained with the secondary antibody alone. FIG. 61 shows photographs of prostate cancer tissues stained with humanized MN-E6-scFv-Fc anti-MUC1* antibody at 50 μg/mL, then stained with a secondary goat-anti-human HRP antibody. A-D are prostate cancer tissue from a patient as denoted in figure. E-H are photographs of the corresponding serial sections that were stained with the secondary antibody alone. FIG. 62 shows photographs of prostate cancer tissues stained with humanized MN-E6-scFv-Fc anti-MUC1* antibody at 50 μg/mL, then stained with a secondary goat-anti-human HRP antibody. A-D are prostate cancer tissue from a patient as denoted in figure. E-H are photographs of the corresponding serial sections that were stained with the secondary antibody alone.

[0336] One aspect of the invention is a method for treating a patient diagnosed with, suspected of having, or at risk of developing a MUC1 positive or MUC1* positive cancer, wherein a specimen is obtained from the patient's cancer and is tested for reactivity with an antibody that binds to PSMGFR SEQ ID NO:2, SNIKFRPGSVVVQLTLAFREGTINVHDVETQFNQYKTEAASRY (SEQ ID NO:620) or SVVVQLTLAFREGTINVHDVETQFNQYKTEAASRY (SEQ ID NO:621).

[0337] The patient is then treated with an scFv, scFv-Fc or CAR T that comprises antibody variable fragments from the antibody that reacted with their cancer specimen. Another aspect of the invention is a method for treating a patient diagnosed with, suspected of having, or at risk of developing a MUC1 positive or MUC1* positive cancer, wherein a specimen is obtained from the patient's cancer and is tested for reactivity with MN-E6-scFv, MN-C2-scFv, MN-C3-scFv or MN-C8-scFv; the patient is then treated with the scFv, scFv-Fc-mut or CAR T that comprises portions of the antibody that reacted with their cancer specimen.

[0338] We discovered that MUC1 can be cleaved to MUC1* by more than one cleavage enzyme and that the site of cleavage affects its fold and consequently affects which monoclonal antibody is able to recognize that form of MUC1*. Different cancer cells or cancerous tissues express different cleavage enzymes. We tested various cleavage enzyme inhibitors on different cancer cell lines and found that an inhibitor that inhibits cleavage of MUC1 in one cancer cell line did not inhibit its cleavage in another cancer cell line. Similarly, PCR experiments showed that cleavage enzymes are expressed at different levels in different cells or cell lines. For example, hematopoietic stem cells of the bone marrow express a MUC1* that is recognized by monoclonal antibody MNC3 but not MNE6 or MNC2 (FIG. 63). The growth of DU145 prostate cancer cells and T47D breast cancer cells is inhibited by the Fabs of MNC2 and MNE6 but not by the Fabs of MNC3 or MNC8, indicating that the cancer cell lines express a MUC1* that is recognized by MNE6 and MNC2 but not by MNC3 or MNC8 (FIG. 64). PCR experiments show that CD34 positive cells of the bone marrow express about 2,500-times more MMP2 and about 350-times more ADAM28 than T47D breast cancer cells, while DU145 prostate cancer cells express about 2,000-times more ADAM TS16, about 400-times more MMP14 and about 100-times more MMP1 than T47D breast cancer cells (FIG. 65 and FIG. 66). Conversely, T47D breast cancer cells express about 80-times more MMP9 than the bone marrow cells and about twice as much as DU145 prostate cancer cells. Various cleavage enzyme inhibitors were tested for their ability to inhibit cleavage in different kinds of cancer cells. TAPI-1 that inhibits MMP2, MMP9, and ADAM17 and MMP2/9 V inhibitor that inhibits MMP2, MMP9, MMP14, inhibited the cleavage of MUC1 in T47D breast cancer cells (FIGS. 67A, 67B), but none of the cleavage enzyme inhibitors tested had an effect in DU145 prostate cancer cells (FIGS. 68A, 68B). These experiments indicated that MUC1 in these breast cancer cells was being cleaved by MMP2, MMP9, MMP14 or ADAM17 or combinations of these enzymes.

### BiTEs

[0339] Divalent (or bivalent) single-chain variable fragments (di-scFvs, bi-scFvs) can be engineered by linking two scFvs. This can be done by producing a single peptide chain with two V_{H} and two V_{L} regions, yielding tandem scFvs. Another possibility is the creation of scFvs with linker peptides that are too short for the two variable regions to fold together (about five amino acids), forcing scFvs to dimerize. This type is known as diabodies. Diabodies have been shown to have dissociation constants up to 40-fold lower than corresponding scFvs, meaning that they have a much higher affinity to their target. Consequently, diabody drugs could be dosed much lower than other therapeutic antibodies and are capable of highly specific targeting of tumors in vivo. Still shorter linkers (one or two amino acids) lead to the formation of trimers, so-called triabodies or tribodies. Tetrabodies have also been produced. They exhibit an even higher affinity to their targets than diabodies.

[0340] All of these formats can be composed from variable fragments with specificity for two different antigens, in which case they are types of bispecific antibodies. The furthest developed of these are bispecific tandem di-scFvs, known as bi-specific T-cell engagers (BiTE antibody constructs). BiTEs are fusion proteins consisting of two scFvs of different antibodies, on a single peptide chain of about 55 kilodaltons. One of the scFvs may bind to T cells such as via the CD3 receptor, and the other to a tumor cell via a tumor specific molecule, such aberrantly expressed MUC1*.

[0341] Another aspect of the invention is a method for treating a patient diagnosed with, suspected of having, or at risk of developing a MUC1 positive or MUC1* positive cancer, wherein the patient is administered an effective amount of a BiTE wherein one antibody variable fragment of the BiTE binds to a T cell surface antigen and the other antibody variable fragment of the BiTE binds to PSMGFR SEQ ID NO:2, SNIKFRPGSVVVQLTLAFREGTINVHDVETQFNQYKTEAASRY (SEQ ID NO:620) or SVVVQLTLAFREGTINVHDVETQFNQYKTEAASRY (SEQ ID NO:621). In one case, the antibody variable fragment of the BiTE that binds to MUC1* comprises portions of huMN-E6, huMN-C2, huMN-C3, or huMN-C8.

[0342] In another aspect of the invention, MUC1* peptides including PSMGFR SEQ ID NO:2, most or all of SNIKFRPGSVVVQLTLAFREGTINVHDVETQFNQYKTEAASRY (SEQ ID NO:620) or SVVVQLTLAFREGTINVHDVETQFNQYKTEAASRY (SEQ ID NO:621) are used in adoptive T cell approaches. In this case, a patient's T cells are exposed to the MUC1* peptides and through various rounds of maturation, the T cells develop MUC1* specific receptors. The adapted T cells are then expanded and administered to the donor patient who is diagnosed with, suspected of having, or is at risk of developing a MUC1* positive cancer.

[0343] A series of CARs were also made that had MNC2 and humanized MNC2 as the extra cellular, targeting head of the CAR. The constructs for these CARs were inserted into a plasmid that was then inserted into a Lenti viral vector. Human T cells were then transduced with the lenti viral vector carrying the MNC2 CARS and huMNC2 CARs. MNC2-scFv-CARs that were mouse sequence or humanized were generated. CARs comprising MNC2-scFv and a variety of transmembrane and intracellular co-stimulatory domains were generated including constructs listed in Table 1. In one aspect of the invention, the CAR comprised huMNC2-scFv-short hinge region-transmembrane domain derived from CD8-short intracellular piece-4-1BB-3zeta. In another aspect, the transmembrane domain was derived from CD4 transmembrane sequence. In another aspect, the intracellular co-stimulatory domain was CD28-3zeta. In yet another aspect, the intracellular co-stimulatory domain was CD28-4-1BB-3zeta.

[0344] There are a variety of methods for assessing whether or not T cells recognize a target cell and are in the process of mounting an immune response. T cells cluster when they recognize a target or foreign cell. This can be readily seen with the naked eye or at low magnification. The appearance of CAR T cell clustering when co-cultured with target cancer cells is one measure of: a) whether or not they recognize the cells as target cells; and b) whether or not they are getting activated to attack the targeted cells, which in this case are cancer cells. FIGS. 80A-80F show photographs of MUC1* positive T47D breast cancer cells that were stably transfected with mCherry, so are red, which were co-cultured with either human T cells without a CAR or human T cells transduced with huMNC2-scFv-CAR44, huMNC2-scFv-CAR49, huMNC2-scFv-CAR50, huMNC2-scFv-CAR18 or huMNC2-scFv-CAR19. In this case, the CAR constructs carry a GFP marker so the CAR transduced T cells are green. As can be seen, there is no T cell induced clustering of the cancer cells when the T cell does not carry a CAR. However, when T cells carrying a MUC1* targeting CAR, there is dramatic clustering of the MUC1* positive cancer cells.

[0345] After T cells recognize and cluster target cells, they overexpress perforin and granzyme B. Together these two molecules activate a cell death pathway in the targeted cell. It is thought that the perforin makes a hole in the target cell into which the T cell injects granzyme B which then activates apoptotic proteases, causing the target cell to lyse. FIGS. 81A-81D show huMNC2-scFV-CAR44 T cells binding to target MUC1* positive prostate cancer cells and injecting granzyme B.

[0346] Another measure of whether or not a T cell has recognized a target cell and is activated to kill that cell, is the upregulation of cytokines, especially interferon gamma (IFN-g). Table 2 lists the results of ELISA experiments measuring the amount of interferon gamma secreted by a variety of MUC1* targeting CAR T cells after co-culture with a variety of different cancer cells. To establish the link between MUC1* expression and CAR T activity, we performed an experiment to determine if the amount of CAR T killing was proportional to the amount of MUC1* expressed by the cancer cell. T47D is a highly MUC1* positive breast cancer cell. These cells also express some full-length MUC1. T47D cells were transfected with varying amounts of additional MUC1* then co-cultured with CAR T cells. The results showed that at low effector (CAR T) to target (cancer cells) ratios such as 1:1, specific CAR T killing increased with increasing MUC1* expression and the amount of secreted interferon gamma also increased with increasing MUC1* (FIG. 82B). Another method for measuring CAR T response is by fluorescence activated cell sorting (FACS). Figure X7A shows a graph of FACS analysis of the T47D cancer cells transfected with additional MUC1*. At a 1:1 E:T ratio, CAR T mediated cancer cell killing increased as the amount of MUC1* expressed on the cancer cells increased. This is important because we previously showed that as cancer cells acquire resistance to chemotherapy agents, they increase the amount of MUC1* that they express (Fessler et al 2009). Therefore an anti-MUC1* CAR T would be especially beneficial as a treatment for cancer patients with late stage cancers or those that have acquired resistance to chemotherapy agents. Several MNC2-scFv-CARs were transduced into human T cells and analyzed by FACS to determine their ability to kill targeted MUC1* positive cancer cells. FIGS. 83A-83D show the results of FACS analysis of huMNC2-CAR44 T cells after 24 hours of co-culture with MUC1* positive cancer cells. FIG. 83A is a graph of FACS data showing the percentage of T47D cancer cells that were killed by huMNC2-CAR44 T cells (blue bars), compared to untransduced T cells (red bars). The X-axis shows the ratio of T cells to cancer cells. FIG. 83B is a graph of FACS data showing the percentage of K562-MUC1* cancer cells that were killed by huMNC2-CAR44 T cells (blue bars), compared to untransduced T cells (red bars). FIG. 83C shows the FACS scans wherein the T47D breast cancer cells were stained with the dye CMTMR. Sytox blue is a dead cell stain. Dead cancer cells are those in quadrants 2 and 3. FIG. 83D shows the FACS scans wherein the K562-MUC1* cancer cells were stained with the dye CMTMR. Sytox blue is a dead cell stain. Dead cancer cells are those in quadrants 2 and 3.

[0347] In addition to FACS analysis, many researchers now use an xCELLigence instrument to measure CAR T killing of cancer cells. FACS is not the best method for tracking T cell induced cell killing because the T cells lyse the target cell. By FACS it is difficult to measure dead cells because they are excluded as cell debris, so one must infer an amount of cell killing and by various methods determine if the missing cells are T cells or cancer cells.

[0348] The xCELLigence instrument uses electrode arrays upon which cancer cells are plated. The adherent cancer cells insulate the electrode and so cause an increase in impedance as they grow. Conversely, T cells are not adherent and remain in suspension so do not contribute to insulation of the electrode which would increase impedance. However, if the T cells or CAR T cells kill the cancer cells on the electrode plate, the cancer cells ball up and float off as they die, which causes the impedance to decrease. The xCELLigence instrument measures impedance as a function of time, which is correlated to cancer cell killing. In addition, the electrode plates also have a viewing window. When CAR T cells effectively kill the adsorbed target cancer cells, there is a decrease in impedance but also one can see that there are no cancer cells left on the plate surface.

[0349] FIGS. 84A-84H show the cytotoxic effect of huMNC2-CAR44 T cells on MUC1* positive DU145 prostate cancer cells as measured by a variety of assays. FIG. 84A is a fluorescent photograph of untransduced T cells co-cultured with the prostate cancer cells, wherein granzyme B is stained with a red fluorophore. FIG. X4B is the DAPI and granzyme B merge. FIG. 84C is a fluorescent photograph of huMNC2-CAR44 T cells co-cultured with the prostate cancer cells, wherein granzyme B is stained with a red fluorophore. FIG. 84D is the DAPI and granzyme B merge. FIG. 84E is a FACS scan for fluorescently labeled granzyme B for untransduced T cells incubated with the cancer cells. FIG. 84F is a FACS scan showing a positive increase in fluorescently labeled granzyme B for huMNC2-CAR44 T cells incubated with the cancer cells. FIG. 84G is a graph of the mean fluorescent intensity. FIG. 84H is an xCELLigence scan tracking the real-time killing of DU145 cancer cells by huMNC2-CAR44 T cells (blue trace) but not by untransduced T cells (green). FIGS. 85A-85H show the cytotoxic effect of huMNC2-CAR44 T cells on MUC1* positive CAPAN-2 pancreatic cancer cells as measured by a variety of assays. FIG. 85A is a fluorescent photograph of untransduced T cells co-cultured with the pancreatic cancer cells, wherein granzyme B is stained with a red fluorophore. FIG. 85B is the DAPI and granzyme B merge. FIG. 85C is a fluorescent photograph of huMNC2-CAR44 T cells co-cultured with the pancreatic cancer cells, wherein granzyme B is stained with a red fluorophore. FIG. 85D is the DAPI and granzyme B merge. FIG. 85E is a FACS scan for fluorescently labeled granzyme B for untransduced T cells incubated with the cancer cells. FIG. 85F is a FACS scan showing a positive increase in fluorescently labeled granzyme B for huMNC2-CAR44 T cells incubated with the cancer cells. FIG. 85G is a graph of the mean fluorescent intensity. FIG. 85H is an xCELLigence scan tracking the real-time killing of CAPAN-2 cancer cells by huMNC2-CAR44 T cells (blue trace) but not by untransduced T cells (green). FIGS. 86A-86C show xCELLigence scans tracking the real-time killing of MUC1* positive cancer cells, but not MUC1* negative cells, by huMNC2-CAR44 T cells. FIG. 86A shows that huMNC2-CAR44 T cells effectively kill HCT colon cancer cells that have been stably transfected with MUC1*. FIG. 86B shows that huMNC2-CAR44 T cells have almost no effect on HCT-MUC1-41TR, which is a MUC1 negative cancer cell that has been stably transfected with a MUC1 full-length. In this cell line only about 10% of the cell have MUC1 cleaved to MUC1*. FIG. 86C shows that huMNC2-CAR44 T cells have no effect on HCT-116 cells, which is a MUC1 negative colon cancer cell line.

[0350] These data demonstrate that T cells transduced with a CAR wherein the antibody fragment targeting head is MNC2, effectively kill MUC1* positive cancer cells. These data specifically show that huMNC2-scFV-CAR44 transduced into human T cells effectively kill MUC1* positive cancer cells. Because we and others have now demonstrated that the most important aspect of CAR T function is the targeting antibody fragment, it follows that an immune cell or a T cell transduced with any CAR having the antibody fragment MNC2-scFV or huMNC2-scFV would have similar efficacy against MUC1 or MUC1* positive tumors. For example, the hinge region that connects the scFv to the transmembrane portion could be any flexible linker. The intracellular co-stimulatory domains could be CD28-3zeta, CD28-4-1BB-3zeta or any combination of immune cell co-stimulatory domains.

[0351] Experiments were also performed exploring methods of pre-activating the CAR T cells to more effectively kill the target cancer cells. We first tested pre-stimulation of the CAR T cells using beads presenting anti-CD3 and anti-CD28 antibodies. This pre-stimulation increased the amount of cell killing but the increase was not specific for the target of the CAR. Rather, the CD3-CD28 stimulated CAR T cells non-specifically killed MUC1* positive and negative cells. We next tried pre-stimulating the CAR T cells with either beads or cancer cells that expressed the target of the antibody portion of the CAR. A synthetic MUC1*_{extra cellular domain} peptide was attached to either 1 μm or 4.5 μm beads. Anti-MUC1* CAR T cells were incubated with the peptide presenting beads for 12-24 hours. FIGS. 87A-87L show the untransduced T cells or the CAR T cells after 24 hour incubation with MUC1* peptide presenting beads. As can be seen, only the CAR transduced T cells show activation-induced clustering. The CAR T cells were separated from the beads by centrifugation, then analyzed by FACS to measure expression of T cell activation markers CD25, CD69 and granzyme B. As can be seen in FIGS. 88A-88D, T cell activation markers increase after incubation with MUC1* presenting beads if and only if the T cell had been transduced with a CAR whose extra cellular domain comprised an anti-MUC1* antibody fragment. In sharp contrast to pre-activation with CD3-CD28 beads, stimulation with MUC1* peptide beads only increased specific killing. There was no increase in the killing of MUC1* negative cells. FIGS. 89A-89C show xCELLigence scans that show the enhanced killing of bead-stimulated anti-MUC1* CAR T cells on human ovarian cancer cells, triple negative breast cancer cells and a MUC1 negative colon cancer cell line that was stably transfected with MUC1*. The enhanced killing capability of MUC1* peptide bead stimulated CAR T cells enabled the CAR T cells to effectively kill target cancer cells for longer periods of time and at much lower T cell to cancer cell ratios. In one aspect of the invention, CAR T cells are pre-stimulated by incubation with beads or surfaces that present a peptide derived from the MUC1* extra cellular domain, before administering to a patient diagnosed with or at risk of developing a MUC1* positive cancer.

[0352] We also tested pre-activating CAR T cells by incubating them with cancer cells that present the target antigen. We incubated huMNC2-CAR44 T cells with HCT-MUC1* cells for 12-24 hours. This pre-stimulation was done once, twice, three or four times. Target cell pre-stimulation also greatly enhanced the specific killing of CAR T cells. As can be seen in FIGS. 90A-90D, specific cell killing by the cancer cell stimulated CAR T cells increased their killing potential even at low CAR T to cancer cell ratios and for longer periods of time. FIGS. 90A-90D show cancer cell stimulated huMNC2-scFv-CAR44 transduced human T cells effectively kill T47D breast cancer cells, BT-20 triple negative breast cancer cells, SKOV-3 ovarian cancer cells and HCT-MUC1* cancer cells. In one aspect of the invention, CAR T cells are pre-stimulated by incubation with MUC1* expressing cells, which may be cancer cells, before administering to a patient diagnosed with or at risk of developing a MUC1* positive cancer. In a preferred embodiment, the MUC1* stimulation cells are UV or chemically inactivated before co-culture with the CAR T cells.

[0353] huMNC2-scFv-CAR44 transduced human T cell that were bead stimulated (Protocol 1) or cancer cell stimulated (Protocol 2) were tested for their ability to inhibit tumor growth in animals. Human cancer cells that had been stably transfected with Luciferase were injected into female NOD/SCID/GAMMA (NSG) mice between 11 and 15 weeks of age. In one experiment, 500,000 HCT-MUC1* cancer cells were injected sub-cutaneously into a rear flank. Tumor engraftment was verified by injecting the animals with Luciferin and then imaging the fluorescent cancer cells using an IVIS instrument. IVIS images taken Day 5 post implantation showed the presence of tumor cells. On Day 6 and on Day 12, 10M huMNC2-scFv-CAR44 T cells were administered to the animals. 5M of the CAR T cells were administered by intratumor injection and the other 5M were administered by tail vein injection. Control groups were injected by same administration routes with either the same number of untransduced T cells or same volume of PBS. IVIS measurements of tumor burden were taken on Days 7, 11, 13, and 21. As can be seen in FIGS. 91A-91Y, both groups of control mice had tumors that continuously grew, whereas the mice treated with bead-stimulated huMNC2-scFv-CAR44 T cells have no detectable cancer cells by Day 21. Three (3) of the five (5) mice treated with cancer cell-stimulated huMNC2-scFv-CAR44 T cells have no detectable cancer cells by Day 21. The other two (2) mice have a barely detectable number of cancer cells remaining by Day 21.

[0354] huMNC2-scFv-CAR44 transduced human T cell that were bead stimulated (Protocol 1) or cancer cell stimulated (Protocol 2) were also tested for their ability to inhibit tumor growth in animals. Human cancer cells that had been stably transfected with Luciferase were injected into female NOD/SCID/GAMMA (NSG) mice between 11 and 15 weeks of age. In another experiment, 500,000 BT-20 MUC1* positive triple negative breast cancer cells were injected sub-cutaneously into a rear flank. Tumor engraftment was verified by injecting the animals with Luciferin and then imaging the fluorescent cancer cells using an IVIS instrument. IVIS images taken Day 6 post implantation showed the presence of tumor cells. On Day 6, after IVIS imaging, 10M huMNC2-scFv-CAR44 T cells were administered to the animals. 5M of the CAR T cells were administered by intratumor injection and the other 5M were administered by tail vein injection. Control group was injected by same administration routes with the same number of untransduced T cells. IVIS measurements of tumor burden were taken on Days 6, 8, and 12. As can be seen in FIGS. 92A-92J, both groups of mice treated with huMNC2-CAR44 T cells showed a decrease in tumor burden compared to the control group.

[0355] huMNC2-scFv-CAR44 transduced human T cell that were bead stimulated (Protocol 1) were also tested for their ability to inhibit ovarian cancer growth in animals. Human SKOV-3 MUC1* positive ovarian cancer cells that had been stably transfected with Luciferase were injected into female NOD/SCID/GAMMA (NSG) mice between 11 and 15 weeks of age. In one experiment, 500,000 SKOV-3 cancer cells were injected into the intraperitoneal cavity to mimic metastatic ovarian cancer in humans. Tumor engraftment was verified by injecting the animals with Luciferin and then imaging the fluorescent cancer cells using an IVIS instrument. IVIS images taken Day 3 post implantation showed the presence of tumor cells. On Day 4 and Day 11, post tumor implantation, 10M huMNC2-scFv-CAR44 T cells were IP administered to the animals. On Day 4, CAR T cells were IP injected. On Day 11 half the CAR T cells were injected into the intraperitoneal space and the other half was injected into the tail vein. Control groups were injected by same administration routes with either the same number of untransduced T cells or same volume of PBS. Subsequent IVIS measurements of tumor burden were taken on Day 7, Day 10 and Day 15. As can be seen in FIGS. 93A-93L, control mice have tumors that are growing at a much faster rate than the huMNC2-CAR44 T cell treated mice. FIG. 93M shows the IVIS color bar correlating photons/second to color.

[0356] One aspect of the invention is a method for treating a patient diagnosed with, suspected of having, or at risk of developing a MUC1 positive or MUC1* positive cancer, wherein the patient is administered an effective amount of immune cells that have been transduced with a MUC1* targeting CAR, wherein the CAR is chosen from among the group consisting of MN-E6-CD8-3z (SEQ ID NOS:294-295); MN-E6-CD4-3z (SEQ ID NOS:746-747); MN-E6-CD8-CD28-3z (SEQ ID NOS:297-298); MN-E6-CD4-CD28-3z (SEQ ID NOS:748-749); MN-E6-CD8-41BB-3z (SEQ ID NOS:300-301); MN-E6-CD4-41BB-3z (SEQ ID NOS:750-751); MN-E6-CD8-CD28-41BB-3z (SEQ ID NOS:303-304); MN-E6-CD4-CD28-41BB-3z (SEQ ID NOS:754-755); MN-E6scFv-Fc-8-41BB-CD3z (SEQ ID NOS:310-311); MN-E6scFv-IgD-Fc-8-41BB-CD3z (SEQ ID NOS:770-771); MN-E6scFv-FcH-8-41BB-CD3z (SEQ ID NOS:315-316); MN-E6scFv-IgD-FcH-8-41BB-CD3z (SEQ ID NOS:772-773); MN-E6scFv-Fc-4-41BB-CD3z (SEQ ID NOS:318-319); MN-E6scFv-FcH-4-41BB-CD3z (SEQ ID NOS:321-322); MN-E6scFv-IgD-8-41BB-CD3z (SEQ ID NOS:323-324); MN-E6scFv-IgD-4-41BB-CD3z (SEQ ID NOS:327-328); MN-E6scFv-X4-8-41BB-CD3z (SEQ ID NOS:330-331); MN-E6scFv-X4-4-41BB-CD3z (SEQ ID NOS:333-334); MN-E6scFv-8-4-41BB-CD3z (SEQ ID NOS:336-337), or any of the aforementioned CARs wherein the MN-E6 is replaced by MN-C2, MN-C3 or MN-C8; MN-C2-CD8-3z (SEQ ID NOS:606-607); MN-C2-CD4-3z (SEQ ID NOS:758-759); MN-C2-CD8-CD28-3z (SEQ ID NOS:608-609); MN-C2-CD4-CD28-3z (SEQ ID NOS:760-761); MN-C2-CD8-41BB-3z (SEQ ID NOS:610-611 and SEQ ID NOS:718-719); MN-C2-CD4-41BB-3z (SEQ ID NOS:762-763); MN-C2-CD8-CD28-41BB-3z (SEQ ID NOS:306-307); MN-C2-CD4-CD28-41BB-3z (SEQ ID NOS:766-767); MN-C2-Fc-8-41BB-CD3z (SEQ ID NOS:732-733); MN-C2-IgD-Fc-8-41BB-CD3z (SEQ ID NOS:734-735); MN-C2-FcH-8-41BB-CD3z (SEQ ID NOS:736-737); MN-C2-IgD-FcH-8-41BB-CD3z (SEQ ID NOS:738-739); MN-C2-IgD-8-41BB-CD3z (SEQ ID NOS:740-741); MN-C2-X4-8-41BB-CD3z (SEQ ID NOS:742-743). Another aspect of the invention is a method for treating a patient diagnosed with, suspected of having, or at risk of developing a cancer, wherein the patient is administered an effective amount of immune cells that have been transduced with one of the aforementioned CARs wherein the MN-E6 is replaced by a peptide comprising antibody variable domain fragments that are specific for a cancer antigen. In any of the above methods, the immune cell may be a T cell and may further be isolated from the patient to be treated.

### Other MUC1 Cleavage Sites

[0357] It is known that MUC1 is cleaved to the growth factor receptor form, MUC1*, on some healthy cells in addition to cancer cells. For example, MUC1 is cleaved to MUC1* on healthy stem and progenitor cells. A large percentage of bone marrow cells are MUC1* positive. Portions of the intestine are MUC1* positive.

[0358] The inventors have discovered that MUC1 can be cleaved at different positions that are relatively close to each other but the location of cleavage changes the fold of the remaining portion of the extracellular domain. As a result, monoclonal antibodies can be identified that bind to MUC1* cleaved at a first position but do not bind to MUC1* that has been cleaved at a second position. This discovery is disclosed in WO2014/028668, filed Aug. 14, 2013, the contents of which are incorporated by reference herein its entirety. We identified a set of anti-MUC1* monoclonal antibodies that bind to MUC1* as it appears on cancer cells but do not bind to MUC1* as it appears on stem and progenitor cells. Conversely, we identified a second set of monoclonal antibodies that bind to stem and progenitor cells but do not bind to cancer cells. One method used to identify stem specific antibodies is as follows: supernatants from monoclonal hybridomas were separately adsorbed onto 2 multi-well plates. Stem cells, which are non-adherent cells, were put into one plate and cancer cells which are adherent were put into an identical plate. After an incubation period, the plates were rinsed and inverted. If the non-adherent stem cells stuck to the plate, then the monoclonal antibody in that particular well recognizes stem cells and will not recognize cancer cells. Antibodies that did not capture stem cells or antibodies that captured cancer cells were identified as cancer specific antibodies. FACS analysis has confirmed this method works.

[0359] Antibodies MN-E6 and MN-C2 are examples of cancer-specific antibodies. Antibodies MN-C3 and MN-C8 are examples of stem-specific antibodies. Although both sets of antibodies are able to bind to a peptide having the PSMGFR sequence, FACS analysis shows that the anti-MUC1* polyclonal antibody and MN-C3 bind to MUC1* positive bone marrow cells but MN-E6 does not. The MUC1* polyclonal antibody was generated by immunizing a rabbit with the PSMGFR peptide. Similarly, MN-C3 binds to stem cells of the intestinal crypts but MN-E6 does not. Conversely, MN-E6 antibody binds to cancerous tissue while the stem-specific MN-C3 does not. Competition ELISA experiments indicate that the C-terminal 10 amino acids of the PSMGFR peptide are required for MN-E6 and MN-C2 binding, but not for MN-C3 and MN-C8. Therefore, another method for identifying antibodies that are cancer specific is to immunize with a peptide having the sequence of the PSMGFR peptide minus the 10 N-terminal amino acids or use that peptide to screen for antibodies or antibody fragments that will be cancer specific. Antibodies that bind to a peptide with a sequence of PSMGFR peptide minus the N-terminal 10 amino acids but do not bind to a peptide with a sequence of PSMGFR peptide minus the C-terminal 10 amino acids are cancer specific antibodies for use in the treatment or prevention of cancers.

[0360] The extracellular domain of MUC1 is also cleaved on stem cells and some progenitor cells, where activation of cleaved MUC1 by ligands NME1 in dimer form or NME7 promotes growth and pluripotency and inhibits differentiation. The transmembrane portion of MUC1 that remains after cleavage is called MUC1* and the extracellular domain is comprised essentially of the Primary Sequence of MUC1 Growth Factor Receptor (PSMGFR) sequence. However, the exact site of cleavage can vary depending on cell type, tissue type, or which cleavage enzyme a particular person expresses or overexpresses. In addition to the cleavage site that we previously identified which leaves the transmembrane portion of MUC1* comprising most or all of the PSMGFR SEQ ID NO:2, other cleavage sites result in an extended MUC1* comprised of most or all of SNIKFRPGSVVVQLTLAFREGTINVHDVETQFNQYKTEAASRY (SEQ ID NO:620); or SVVVQLTLAFREGTINVHDVETQFNQYKTEAASRY (SEQ ID NO:621). The site of MUC1 cleavage affects how the remaining extracellular domain folds. We have identified monoclonal antibodies that bind to cleaved MUC1* on cancer cells but do not bind to cleaved MUC1* as it exists on healthy stem and progenitor cells.

[0361] Whereas an anti-MUC1* antibody or antibody-like molecule may be most effective if it competitively inhibits the binding of NME1, NME6, NME8 or NME7 or NME7-AB to MUC1*, for example an antibody that binds to the PSMGFR sequence especially if said antibody is unable to bind to a PSMGFR peptide if the 10 C-terminal amino acids are missing, antibodies or antibody-like molecules that carry a payload need not competitively inhibit the binding of MUC1* ligands to be effective as anti-cancer agents. For example antibodies or antibody-like molecules that are conjugated to a toxin could be effective at killing target cancer cells without necessarily inhibiting binding of the activating ligands. For example, antibodies or antibody-like molecules incorporated into CAR Ts or BiTEs which recruit the patient's immune system to the tumor can be effective as anti-cancer agents even if the antibody fragment targets a portion of MUC1* such that antibody fragment binding does not competitively inhibit the binding of NME1, NME6, NME8, NME7-AB or NME7. In a preferred embodiment the antibody fragment incorporated into a CAR, an adaptive T cell receptor or a BiTE competitively inhibits the binding of NME1, NME6, NME8, NME7-AB or NME7 to MUC1*.

[0362] Antibodies that are able to bind to the extracellular domain of the remaining transmembrane portion block the interaction between the MUC1* extracellular domain and activating ligands and in this way can be used as therapeutic agents, for example for the treatment of cancers. Anti-MUC1* antibodies are also useful for the growth, delivery, identification or isolation of stem cells both in vitro and in vivo.

General Strategy for Using Antibodies, Antibody Fragments and CARs that Target the Extracellular Domain of MUC1*

[0363] Monoclonal antibodies MN-C3 and MN-C8 have a greater binding affinity for blood cells than solid tumor cancer cells. Humanized antibodies and antibody fragments containing sequences derived from the variable regions of MN-C3 and MN-C8 can be used as a stand alone therapy or integrated into CAR Ts, BiTEs, ADCs for the treatment of blood cancers.

[0364] Alternatively, humanized antibodies and antibody fragments containing sequences derived from the variable regions of MN-C3 and MN-C8 can be used to deliver stem cells to a specific location such as for in situ human therapeutics. In one case, a substrate coated with humanized MN-C3 or MN-C8 derived antibodies or antibody fragments is loaded with stem cells then inserted into a patient. In another case, a substrate coated with humanized MN-C3 or MN-C8 derived antibodies or antibody fragments is inserted into a patient in order to recruit the patient's own stem cells to a specific area for therapy. Human therapies in which antibodies that bind to human stem cells will be of therapeutic use include spinal cord repair. Substrates coated with humanized MN-C3 or MN-C8 derived antibodies or antibody fragments are also used to identify or isolate human antibodies. Humanized MN-C3 or MN-C8 derived antibodies can also be used to stimulate the growth of stem cells.

### CARs and Cleavage Enzymes

[0365] Many applications of CAR T therapy are limited by the length or flexibility of the extracellular domain between the T cell membrane and the antibody fragment that will direct the T cell to the desired location. For example, the surface of solid tumor cancer cells is populated with a myriad of cell surface proteins and growth factor receptors. Many of these cell surface proteins have bulky extracellular domains that limit the access of immune cells, such as T cells or CAR T cells, to the tumor cell surface. In one example, MUC1 and the cleaved growth factor receptor form MUC1* are overexpressed on over 75% of solid tumor cancers and on some blood cancers. The extracellular domain of MUC1 full-length contains between about 1,500 and 2,500 amino acids while the extracellular domain of MUC1* contains only about 45 to 65 amino acids. Variability in the length of MUC1 full-length is due to variability in the number of tandem repeat units that are expressed. Variability in the length of MUC1* is due to different cleavage sites when MUC1 is cleaved by different cleavage enzymes. Whereas it is most desirable to get the T cell close to the surface of the cancer cell, access can be sterically hindered by neighboring proteins, including full-length MUC1, that have large and bulky extracellular domains. This is especially true for early stage cancers. Tissue studies show that early stage cancers have more full-length MUC1 than late stage cancers that can be devoid of any full-length MUC1. This problem can in some cases severely limit the efficacy of cancer immunotherapies, including CAR T, adaptive T cell therapy, BiTEs and other T cell engagers.

[0366] One solution to this problem is to express or activate cleavage enzymes in the area of the targeted tumor cells to cleave the bulky proteins that restrict access of T cells to the tumor. FIGS. 94A-94B show a cartoon of a CAR T cell that when near the tumor, expresses a cleavage enzyme that then cleaves MUC1 to MUC1*.

[0367] In one aspect of the invention, the cleavage enzyme and the CAR are transduced into the same T cell. In another aspect of the invention, the cleavage enzyme is on an inducible promoter such that its expression is activated when the CAR engages the targeted cancer cells. In some cases, the expression of the cleavage enzyme is controlled by an inducible promoter. In one aspect of the invention, expression of the cleavage enzyme is induced when the immune cell is activated, for example when it recognizes or engages its target. In one example, a T cell is transfected or transduced with a cleavage enzyme whose expression is induced when the T cell recognizes a target cancer cell. One way to do this is to induce expression of the cleavage enzyme when, or shortly after, an NFAT protein is expressed or translocated to the nucleus. For example, a sequence derived from an NFAT promoter region is put upstream of the gene for the cleavage enzyme. In this way, when the transcription factors that bind to the promoter of the NFAT protein are present in sufficient concentration to bind to and induce transcription of the NFAT protein, they will also bind to that same promoter that is engineered in front of the sequence for transcription of the cleavage enzyme. The NFAT protein may be NFAT1 also known as NFATc2, NFAT2 also known as NFATc or NFATc1, NFAT3 also known as NFATc4, NFAT4 also known as NFATc3, or NFAT5. In one aspect of the invention, the NFAT is NFATc1, NFATc3 or NFATc2. In one aspect of the invention, the NFAT is NFAT2 also known as NFATc1. SEQ ID NO:646 shows nucleic acid sequence of the upstream transcriptional regulatory region for NFAT2. The promoter sequence for NFAT gene may include the nucleic acid sequence of SEQ ID NO:781-783 or SEQ ID NO:815 as examples, but it can be seen that the optimal sequence or minimal sequence for expression of the cleavage enzyme may be obtained by making fragments, extensions or mutations of the promoter and testing for the strength of the promoter with respect to expression of the cleavage enzyme. In one aspect of the invention, the transcriptional regulatory region for NFAT2 is engineered upstream of the gene encoding the cleavage enzyme MMP9 (SEQ ID NO:647) or the catalytic sub-unit of MMP9 (SEQ ID NO:648). In one aspect of the invention, the NFAT is NFATc3 and the promoter sequence of NFATc3 includes nucleic acid sequences from SEQ ID NO:816. In one aspect of the invention, the transcriptional regulatory region for NFATc3 is engineered upstream of the gene encoding the cleavage enzyme MMP9 (SEQ ID NO:647) or the catalytic sub-unit of MMP9 (SEQ ID NO:648). In another aspect of the invention, the NFAT is NFATc2. SEQ ID NO:817-818 shows nucleic acid sequence of the upstream transcriptional regulatory region for NFATc2. In one aspect of the invention, the transcriptional regulatory region for NFATc2 is engineered upstream of the gene encoding the cleavage enzyme MMP9 (SEQ ID NO:647) or the catalytic sub-unit of MMP9 (SEQ ID NO:648).

[0368] Another method for having the expression of the cleavage enzyme induced when the T cell or CAR T cell is activated is to have the gene for the cleavage enzyme on an inducible promoter where the NFAT protein itself binds to and induces transcription of the cleavage enzyme. In this case, an NFAT response element (NFAT RE) may be positioned upstream of the gene for the cleavage enzyme or fragment of the cleavage enzyme. The NFAT may bind to its responsive element upstream of the cleavage enzyme alone or as part of a complex. The NFAT protein may be NFATc1, NFATc2, NFATc3, NFATc4, or NFAT5. In a preferred embodiment, the NFAT protein is NFAT2 aka NFATc1, aka NFATc. The gene of the cleavage enzyme or fragment thereof is cloned downstream of an NFAT-response element (SEQ ID NO:649), which may be repeats of the response element (SEQ ID NO:650) and CMV minimal promoter (mCMV) (SEQ ID NO:651) to induce expression of cleavage enzyme by NFAT protein. The NFAT response element may include nucleic acid sequence of NFAT consensus sequence (SEQ ID NO:804). The NFAT response element may include the nucleic acid sequence of SEQ ID NOS:805-814 as examples, but it can be seen that the optimal sequence or minimal sequence for expression of the cleavage enzyme may be obtained by making fragments, extensions or mutations of the responsive element nucleic acid and testing for the strength of the responsive element with respect to expression of the cleavage enzyme. The enhancer region of Foxp3 also contains NFAT response elements within the 120-bp from 2079 to 2098 (SEQ ID NO:821). The NFAT response element may include nucleic acid NFAT consensus sequence of (5′-cattttttccat-3′) (SEQ ID NO:819) or (5′-tttttcca-3′) (SEQ ID NO:820), which NFATc1 specifically binds to (Xu et al., Closely related T-memory stem cells correlate with in vivo expansion of CAR. CD19-T cells and are preserved by IL-7 and IL-15, Blood 2014 123:3750-3759), or repeats thereof. The NFAT response elements may also be separated by nucleic acid spacer sequences. Other NFAT responsive elements may exist and may further be discovered, and a skilled artisan in the art when directed to determine NFAT responsive element may do so by carrying out molecular biological assays to obtain it given the guidance of at least the responsive elements as set forth as SEQ ID NOS: 804-814 albeit as only mere examples. In one aspect of the invention, the cleavage enzyme that is downstream of the NFAT-response element and CMV minimal promoter is MMP9 (SEQ ID NO:652). In another aspect of the invention, the cleavage enzyme is a catalytic sub-unit of MMP9 (SEQ ID NO:653).

[0369] Because NFATs 1-4 are regulated by the calcineurin pathway, potential toxicities that may arise in a patient can be stopped by treatment with an immunosuppressive agent such as FK506, Cyclosporin, Cyclosporin A, or Tacrolimus that block calcineurin activity and inhibit NFAT translocation to the nucleus. The T cell transduced or transfected with a cleavage enzyme on an inducible promoter may also be transfected or transduced with a CAR that recognizes a protein or molecule on the cancer cell. In a specific example, the cleavage enzyme is one that is able to cleave MUC1 full-length and the CAR bears an antibody fragment that directs it to MUC1* on the surface of cancer cells.

[0370] To determine which cleavage enzymes cleave MUC1 on cancer cells, we tested a series of MMP and ADAM enzyme inhibitors. These experiments pointed to MMP9 as being an important cleavage enzyme in cancer cells. To confirm that MMP9 cleaves MUC1 on cancer cells, we transfected HCT-116 MUC1 negative colon cancer cells with a mimic of full-length MUC1 having 41 tandem repeat domains: HCT-MUC1-41TR. Through single cell cloning we were able to establish this cell line wherein MUC1 only minimally gets cleaved to MUC1*. FIGS. 95A-95D show Western blots and FACS analysis showing that HCT-MUC1-41TR is 95% positive for full-length MUC1 and only 5-10% positive for the cleaved form, MUC1*. HCT-MUC1-41TR cells were incubated with MMP9 at varying concentrations and then assayed by immunofluorescence to measure binding of MNC2 monoclonal antibody to the resultant cells. As can be seen in FIGS. 96A-96E, binding of MNC2 increased as the concentration of MMP9 added to the cells increased. These experiments show that MMP9 cleaves MUC1 to a form that is recognized by MNC2. The human cancer tissue array studies we performed (FIG. 69A-69D, FIG. 70A-70F, FIG. 71A-71F, FIG. 72A-72F, FIG. 73A-73F) show that MNC2 recognizes the form of cleaved MUC1 that is present on cancerous tissue but not on healthy cells or tissues (FIG. 74A-74I). Importantly, MNC2 does not recognize the form of cleaved MUC1 that is expressed on healthy hematopoietic stem cells of the bone marrow.

[0371] In one aspect of the invention, an immune cell is transduced with both a CAR to target the immune cell to the tumor, and a cleavage enzyme. The CAR and the cleavage enzyme can be encoded on the same plasmid or on two different plasmids. In one aspect, the cleavage enzyme is on an inducible promoter. In another aspect, expression of the cleavage enzyme is induced by a protein that is expressed when the immune cell is activated. In one case, expression of the cleavage enzyme is induced by an NFAT protein. In another aspect, expression of the cleavage enzyme is induced by NFATc1. In another aspect, expression of the cleavage enzyme is induced when one of the NFAT proteins binds to an NFAT response element that is inserted upstream of the gene for the cleavage enzyme or a catalytically active fragment thereof. In one aspect, the cleavage enzyme is MMP9 or a fragment of MMP9 that is catalytically active.

[0372] In one aspect of the invention, the cleavage enzyme is MMP9 (SEQ ID NO:643). Some cleavage enzymes are naturally expressed as pro-enzymes that need to be activated. This can be accomplished by biochemical means, by expressing a co-enzyme that activates a cleavage enzyme or by engineering the enzyme in an activated form. The invention anticipates overcoming this problem by co-expressing the cleavage enzyme with its activator. In one aspect of the invention, the cleavage enzyme is MMP9 and the co-activator is MMP3. In another aspect of the invention, the cleavage enzyme is expressed in a form that is already active, for example by expressing a fragment of the cleavage enzyme that still has catalytic function. In one case, the cleavage enzyme is an MMP9 fragment that is catalytically active. One example of an MMP9 catalytic fragment is given as SEQ ID NO:645.

[0373] MMP9, which must be activated by MMP3, is overexpressed in a large percentage of solid tumors. Further, it is known that MNC2 anti-MUC1* monoclonal antibody recognizes MUC1 after it is cleaved by MMP9. The breast, ovarian, pancreatic and lung cancer arrays that were shown in FIGS. 69-73 were probed with MNC2-scFv, further indicating that MUC1 in these cancers is being cleaved by MMP9. To see if cleavage of tumors by MMP9 would increase T cell access to the tumor, we did a series of experiments using a cell line that expresses full-length MUC1, HCT-MUC1-41TR, a breast cancer cell line that is a high expresser of both full-length MUC1 and MUC1* and a MUC1 negative cell line that we transfect with MUC1*45. We transfected cells with MMP9 and MMP3, which activates MMP9. We took the supernatant of those cells, which contained activated MMP9, and added it to the various cells, which were then co-cultured with T cells transduced with an anti-MUC1* CAR: huMNC2-CAR44. The result was greatly increased CAR T cell killing of the targeted MUC1/MUC1* positive cancer cells, compared to the control cells that were not incubated with a MUC1 cleavage enzyme.

[0374] APMA is a biochemical that activates MMPs. We used APMA along with the conditioned media of cells that we transfected with either MMP9 or ADAM17 to see if any of these cleavage enzymes would cleave MUC1 on the HCT-MUC1-41TR cell line that only expresses full-length MUC1. As controls, we also tested the enzymes on HCT-MUC1* cells. The MUC1 and MUC1* expressing cells were stained with a red dye, CMTMR. Human T cells that were transduced with an anti-MUC1* CARs, CAR44 or CAR50 were co-cultured with the cancer cells. Untransduced T cells were used as a control. As can be seen in FIGS. 75B, 75C, and 75D, the anti-MUC1* CAR T cells effectively recognized and clustered the HCT-MUC1* cancer cells, which is a sign of T cell activation and killing. However, no CAR T cell induced clustering is visible in the wells containing HCT-MUC1-41TR, the full-length MUC1 expressing cells (FIGS. 75F, 75G, and 75H). However, the cells that were incubated with activated MMP9 show dramatic increase in CAR T cell induced clustering (FIGS. 75J, 75K, and 75I), implying that MMP9 cleaved the full-length MUC1 to a form of MUC1* that is recognized by MNC2 monoclonal antibody and more specifically by huMNC2-scFv. ADAM17 had no apparent effect. ADAM17 either did not cleave MUC1 or cleaved it at a position that is not recognized by MNC2, which is more likely.

[0375] We performed the same experiment, this time using T47D breast cancer cells that were hard to kill using anti-MUC1* CAR T cells presumably because they express high levels of full-length MUC1 as well as MUC1*. As can be seen in FIGS. 76B, 76C, and 76D, anti-MUC1* CAR44 and CAR50 have little effect on the T47D cancer cells. Only in FIG. 76D, which is CAR44 at the highest level of CAR expression in the T cells, do we see a small amount of CAR T cell induced clustering. However, the presence of activated MMP2 (FIGS. 76J, 76K, 76L) or activated MMP9 (FIGS. 76R, 76S, 76T) shows a dramatic increase in CAR T cell recognition, clustering and killing, showing that cleavage of full-length MUC1 increases T cell access to the cancer cells.

[0376] In another example, T47D MUC1 positive tumor cells were incubated with a recombinant catalytic domain of MMP9 (Enzo Life Sciences, Inc., Farmingdale, NY) at either 100 ng/mL or 500 ng/mL. Western blot analysis showed that the MUC1/MUC1* positive cancer cells underwent extensive cleavage of MUC1 to MUC1*. In another example, T47D breast cancer cells were pre-incubated with a human recombinant MMP9 catalytic domain protein then co-cultured with anti-MUC1* CAR44 T cells. The specific killing of the T47D cells by CAR44 T cells was monitored in real-time on an xCelligence instrument that measures impedance as a function of time. This analysis uses electrode arrays upon which cancer cells are plated. The adherent cancer cells insulate the electrode and cause an increase in impedance as they grow. Conversely, T cells are not adherent and remain in suspension so do not increase or decrease impedance. However, if the T cells or CAR T cells kill the cancer cells on the electrode plate, the cancer cells ball up and float as they die, which causes the impedance to decrease. The addition of MMP9 catalytic domain dramatically increased the killing of T47D cancer cells. FIG. 78 shows an xCelligence graph of T47D breast cancer cells in co-culture with either untransduced T cells, as a control, or huMNC2-CAR44 T cells over a 45 hour period. After 18 hours of cancer cell growth, a catalytic sub-unit MMP9 was added to some of the cells. At 25 hours, T cells were added. As can be seen, huMNC2-CAR44 T cell killing is greatly improved when the T47D cells are pre-incubated with cleavage enzyme MMP9. In the xCelligence system, target cancer cells, which are adherent, are plated onto electrode array plates. Adherent cells insulate the electrode and increase the impedance. The number of adherent cancer cells is directly proportional to impedance. T cells are not adherent and do not contribute to impedance. Therefore, increasing impedance reflects growth of cancer cells and decreasing impedance reflects killing of cancer cells. Prostate cancer cell line DU145 expresses both MUC1 and MUC1* but at a much lower level of expression than T47D cells. DU145 cells are efficiently killed by anti-MUC1* CAR T cells in the presence or absence of a cleavage enzyme.

[0377] FIG. 79 shows an xCelligence graph of DU145 prostate cancer cells in co-culture with either untransduced T cells, as a control, or huMNC2-CAR44 T cells over a 45 hour period. After 18 hours of cancer cell growth, a catalytic sub-unit MMP9 was added to some of the cells. At 25 hours, T cells were added. As can be seen, huMNC2-CAR44 T cell killing of low density MUC1/MUC1* positive cancer cells is not affected by pre-incubation with cleavage enzyme MMP9. DU145 cancer cells express a significantly lower amount of MUC1 which includes the full-length form as well as MUC1*. The lower density of full-length MUC1 does not sterically hinder T cell access to the membrane proximal MUC1*. DU145 cells represent an early stage cancer that expresses both full length and cleaved MUC1 but at lower levels so that T cell access is not sterically hindered. T47D cells represent mid-stage cancers that express high levels of both MUC1 and MUC1*, wherein the density of MUC1 full-length sterically hinders access of T cells to the tumor. HCT-MUC1* cells are a MUC1 negative cell line that has been stably transfected with MUC1*45, and they represent late stage cancer cells. It is significant that MUC1 cleaved to MUC1* by MMP9 is recognized by the anti-MUC1* antibody MNC2, which is the targeting head of the CAR. Immune cell access to tumor antigens on the cancer cell surface can be sterically hindered by the presence of bulky extra cellular domain proteins or other obstructing elements also known as the tumor micro-environment. The aforementioned serve as an example that can be extended to improve the efficacy of CAR T therapies that target other tumor antigens. In one aspect of the invention, an immune cell is transfected or transduced with both a CAR comprising an antibody fragment that targets a tumor antigen and a cleavage enzyme. In another aspect of the invention, an immune cell is transfected or transduced with both a CAR comprising an antibody fragment that targets a tumor antigen and a cleavage enzyme that cleaves a tumor antigen to a form recognized by the antibody fragment of the CAR. In one aspect, an immune cell is transfected or transduced with both a CAR comprising an antibody fragment that targets a tumor antigen and a cleavage enzyme that cleaves a tumor antigen to a form recognized by the antibody fragment of the CAR, wherein the antibody fragment of the CAR recognizes MUC1* extra cellular domain and the cleavage enzyme cleaves MUC1 to MUC1*. In one aspect, an immune cell, which may be a T cell or an NK cell, is transfected or transduced with a CAR comprising an antibody fragment derived from MNC2, MNE6, MNC3 or MNC8 and a cleavage enzyme chosen from the group comprising MMP1, MMP2, MMP3, MMP7, MMP8, MMP9, MMP11, MMP12, MMP13, MMP14, MMP16, ADAM9, ADAM10, ADAM17, ADAM 19, ADAMTS16, ADAM28 or a catalytically active fragment thereof.

[0378] A convenient method for testing the presence of MMP9 is with a fluorogenic assay, for example using the OMNIMMP peptide assay kit. The kits have a peptide that is an MMP9 substrate that has been derivatized with a masked fluorophore. When MMP9 is added to a solution containing the peptide, MMP9 cleaves the peptide at a position that unmasks the fluorophore and the fluorescence can be read on a plate reader. MMP-9 activity is read in Relative Fluorescent Units (RFUs) which is an arbitrary value related to the amount of light detected by a plate reader set to excite each well containing samples at 328 nm and measure the emission at 393 nm. An increase in RFUs indicates cleavage of the Gly-Leu bond, unmasking of the fluorophore and therefore the presence of MMP-9. The sequence of the OMNIMMP peptide is Mca-Pro-Leu-Gly-Leu-Dpa-Ala-Arg-NH₂. AcOH [Mca=(7-methoxycoumarin-4-yl)acetyl; Dpa=N-3-(2,4-dinitrophenyl)-L-a,β-diaminopropionyl]. FIG. 97 shows a graph of the OMNIMMP fluorogenic peptide substrate of MMP9 being cleaved by MMP9 catalytic domain and emitting fluorescence. The MMP9 catalytic domain was added at two concentrations in either PBS, solid trace, or cell culture media, dashed trace. This experiment shows that the OMNIMMP peptide assay will measure the activity of MMP9 that has been secreted by cells even if they are in cell growth media.

[0379] A method for studying activation of the NFAT pathway is by chemically activating the pathway using PMA with Ionomycin (Lyakh et al., Expression of NFAT-Family proteins in normal human T cells, MOLECULAR AND CELLULAR BIOLOGY, Vol. 17, No. 5, May 1997, p. 2475-2484; Rao et al., Transcription factors of the NFAT family-Regulation and function, Annu. Rev. Immunol. 1997. 15:707-47; Macian, NFAT proteins-Key regulators of T-cell development and function, Nature Reviews Immunology, Vol. 5, pp 472-484 June (2005)). It has been demonstrated that PMA and Ionomycin induce expression of NFAT proteins. The above-cited references show a scheme of the regulation of NFAT activation. Ionomycin increases calcium which activates the Calcineurin/Calmodulin complex. Calcineurin/Calmodulin dephosphorylate NFAT, which causes NFATs, especially NFATc1, to be translocated to the nucleus where it binds to DNA to stimulate transcription of target genes. NFATc1 is one of the first NFAT proteins to be translocated to the nucleus upon T cell activation and it is only there transiently before it exits the nucleus. Therefore, PMA plus Ionomycin activation of cells we transfected or transduced with NFAT inducible cleavage enzymes is physiologically relevant and mimics in vivo T cell activation turning on expression of the NFAT inducible cleavage enzymes described herein.

[0380] The HEK293T cell line (human embryonic kidney cell), originally referred as 293tsA1609neo, is a highly transfectable derivative of human embryonic kidney 293 cells, and contains the SV40 T-antigen. This cell line is competent to replicate vectors carrying the SV40 region of replication. It gives high titers when used to produce retroviruses. It has been widely used for retroviral production, gene expression and protein production. HEK293T cells were used in some of the early experiments, before the plasmids were inserted into lenti viral vectors and transduced into human T cells.

[0381] A plasmid was constructed then transfected into HEK293T cells, wherein the gene for MMP9 catalytic domain was inserted downstream of either 3 or 4 NFAT response elements. The NFAT pathway was activated by the addition of PMA at 10 ng/mL and Ionomycin at either luM or 2 uM. Lysate from cells transfected with the plasmid containing 3 or 4 repeats of a NFAT Response element, or the conditioned media from the cells, were assayed for the presence of MMP9 in a Western blot assay. As can be seen in FIGS. 98A-98E only the cells that contained the NFAT response elements upstream of the MMP9 and also wherein the NFAT pathway was activated by PMA/Ionomycin, was MMP9 detectable from the lysates and conditioned media. In addition, the amount of MMP9 expressed or secreted was proportional to the concentration of the NFAT pathway activators. We next tested the MMP9 from the lysate and also the MMP9 that was secreted into the conditioned media to see if it was active and able to cleave the MMP9 substrate. FIGS. 99A-99B show graphs of a fluorogenic peptide substrate of MMP9 being cleaved by the cell lysate or conditioned media of HEK293T cells that were transfected with a plasmid containing an MMP9 gene downstream from 4 repeats of an NFAT response element. The MMP9 peptide substrate assay shows that activation of the NFAT pathway by PMA/ionomycin caused an MMP9 to be expressed and secreted and that it was active as evidenced by its ability to cleave a peptide substrate.

[0382] We also tested whether the native leader sequence that is in front of the MMP9 gene is essential or if it could be replaced by other leader sequences that might increase its expression or secretion from the cells. These next experiments showed that the native MMP9 leader sequence can be replaced with other leader sequences. FIGS. 100A-100D show NFAT-induced MMP9 catalytic domain expressed in HEK293T cells wherein the native leader sequence of MMP9 has been replaced by an IgK leader sequence and MMP9 catalytic domain is downstream of 4 repeats of an NFAT response element. FIG. 100A shows photograph of Western blot detecting expression of MMP9 in the cell lysate after activation of the NFAT pathway. FIG. 100B shows photograph of Western blot detecting expression of MMP9 in the conditioned media after activation of the NFAT pathway. FIG. 100C shows graph of MMP9 fluorogenic peptide substrate cleavage by MMP9 catalytic domain expressed and secreted in conditioned media of HEK293T cells wherein the native leader sequence of MMP9 has been replaced by an IgK leader sequence and MMP9 catalytic domain is downstream of 4 repeats of an NFAT response element. FIG. 100D shows graph of MMP9 fluorogenic peptide substrate cleavage by MMP9 catalytic domain expressed and secreted in conditioned media of HEK293T cells wherein the native leader sequence of MMP9 has been replaced by an IgK leader sequence and MMP9 catalytic domain is downstream of 4 repeats of an NFAT response element. FIGS. 101A-101C show MMP9 can be expressed with different leader sequences and also show subsequent activity of each. FIG. 101A shows a Western blot detecting an MMP9 protein in cell lysate wherein the leader sequence upstream of the MMP9 gene is either its native sequence or an IgK sequence. FIG. 101B shows a Western blot detecting MMP9 in conditioned media wherein the leader sequence upstream of the MMP9 gene is its native sequence or an IgK sequence. FIG. 101C shows a graph of an MMP9 peptide substrate cleaved by the expressed MMP9.

[0383] To design a construct that will have cleavage enzyme expression induced by proteins that are expressed or are translocated to the nucleus only after T cell activation, it is possible to have the enzyme gene downstream of response elements or downstream of the promoter of that cleavage enzyme. Another plasmid was made in which the gene for an MMP9 catalytic domain was inserted downstream from a portion of the promoter of NFATc1. The experiments shown in FIGS. 102A-102B compare expression levels of MMP9 expressed off of the NFATc1 promoter or off of 4 repeats of an NFAT response element. They show that both approaches work well. FIGS. 102A-102B show 3 clones 4, 6 and 7 of cells transfected with a plasmid that produces an NFAT inducible MMP9 wherein the NFATc1 promoter sequence is upstream of the MMP9 gene, which in this case is a truncated MMP9 comprising its catalytic domain. Also shown for comparison is a cell transfected with a plasmid that produces an NFAT inducible MMP9 wherein 4 repeats of an NFAT response element sequence are upstream of an MMP9 gene. FIG. 102A shows a Western blot detecting an MMP9 protein in cell lysate. FIG. 102B shows a Western blot detecting MMP9 in the conditioned media. FIGS. 103A-103B show that the MMP9 in the cleared lysate and the MMP9 in the conditioned media are also active as they cleave the MMP9 substrate in the peptide fluorogenic assay.

[0384] We next tested whether or not the NFAT-inducible MMP9 would work in human T cells and if it would specifically be expressed and secreted after T cell activation. To test this, the construct having 4 repeats of the NFAT response element were incorporated into a lenti viral vector. Human T cells were transduced with either an NFAT-inducible MMP9 alone, a CAR44 alone or both CAR44 and an NFAT-inducible MMP9. In some cases, the transduced T cells were activated by incubating them with beads coated with anti-CD3 and anti-CD28, which are known to activate T cells. In other cases, the transduced T cells were activated by co-culturing them with beads presenting the synthetic MUC1* peptide or by co-culturing with MUC1* positive cancer cells such as HCT-MUC1* cells.

[0385] FIGS. 104A-104B show the results of the OMNIMMP9 fluorogenic substrate assay that measures activity of MMP9. Conditioned media from human T cells transduced with NFAT-inducible MMP9 alone or in combination with CAR44 were added to the assay and MMP9 substrate cleavage was measured as a function of time. FIG. 104A shows MMP9 activity when human T cells were transduced with both CAR44 and an NFAT-inducible MMP9 after the cells were activated by co-culturing with HCT-MUC1* cancer cells. The trace that does not show increased substrate cleavage as a function of time is the conditioned media from cells that were not activated. FIG. 104B shows MMP9 activity when human T cells were transduced with just an NFAT-inducible MMP9 after the cells were activated by co-culturing with beads coated with anti-CD3 and anti-CD28 which are known to activate T cells. The trace that does not show increased substrate cleavage as a function of time is the conditioned media from cells that were not activated. FIGS. 105A-105E show photographs of Western blots of human T cells transduced with either CAR44 alone, NFAT-inducible MMP9 alone or transduced with both CAR44 and NFAT-inducible MMP9, wherein the resultant T cells are either not activated, chemically activated by PMA/Ionomycin, activated by co-culturing with beads presenting synthetic MUC1* peptide or co-culturing with MUC1* positive cancer cells. Western blot was probed with an anti-Flag tag also known as DYK tag antibody. Catalytic domain of MMP9 runs with an apparent molecular weight of about 40 kDa. FIGS. 105A-105D show photographs of Western blots of cleared cell lysates. FIG. 105A has Lanes 1-7 loaded with lysates of: Lane 1: T cells transduced with CAR44 and not activated; Lane 2: T cells transduced with CAR44 and activated with beads presenting synthetic MUC1* extra cellular domain peptide; Lane 3: T cells transduced with CAR44 and activated by co-culture with HCT-MUC1* cancer cells; Lane 4: T cells transduced with CAR44 and NFAT-inducible MMP9 but not activated; Lane 5: T cells transduced with CAR44 and NFAT-inducible MMP9 and activated with beads presenting synthetic MUC1* extra cellular domain peptide; Lane 6: T cells transduced with CAR44 and NFAT-inducible MMP9 and activated by co-culture with HCT-MUC1* cancer cells; Lane 7: an irrelevant protein also bearing the Flag DYK tag. Results show that T cells transduced with NFAT-inducible MMP9 only express MMP9 when they are activated by PMA/Ionomycin, MUC1* beads or MUC1* positive cancer cells. T cells transduced with both CAR44 and NFAT-inducible MMP9 only express MMP9 when the T cells are activated by stimulation with MUC1* beads or with MUC1* positive cancer cells. FIG. 105B has Lanes 1-7 loaded with lysates of: Lane 1: T cells transduced with CAR44 and not activated; Lane 2: T cells transduced with CAR44 and activated with beads presenting anti-CD3 and anti-CD28 antibodies that are known to activate T cells; Lane 3: T cells transduced with CAR44 and activated by co-culture with PMA/Ionomycin; Lane 4: T cells transduced with NFAT-inducible MMP9 but not activated; Lane 5: T cells transduced with NFAT-inducible MMP9 and activated with beads presenting anti-CD3 and anti-CD28 antibodies; Lane 6: T cells transduced with NFAT-inducible MMP9 and activated by PMA/Ionomycin; Lane 7: an irrelevant protein also bearing the Flag DYK tag. FIGS. 105C and 105D are darker exposures of the same Western blots shown in FIGS. 105A and 105B, respectively. FIG. 105E is a photograph of a Western blot of cell supernatants of cells transduced as follows: Lane 1: T cells transduced with CAR44 and not activated; Lane 2: T cells transduced with CAR44 and activated with beads presenting anti-CD3 and anti-CD28 antibodies that are known to activate T cells; Lane 3: T cells transduced with CAR44 and activated by co-culture with PMA/Ionomycin; Lane 4: T cells transduced with NFAT-inducible MMP9 but not activated; Lane 5: T cells transduced with NFAT-inducible MMP9 and activated with beads presenting anti-CD3 and anti-CD28 antibodies; Lane 6: T cells transduced with NFAT-inducible MMP9 and activated by PMA/Ionomycin; Lane 7: an irrelevant protein also bearing the Flag DYK tag. Results show that T cells transduced with NFAT-inducible MMP9 express MMP9 when they are activated. T cells transduced with both CAR44 and NFAT-inducible MMP9 are specifically activated when they are co-cultured with beads or cells presenting or expressing MUC1* (FIG. 105A Lane 5 and Lane 6).

[0386] In one aspect of the invention, a person diagnosed with cancer or at risk of developing cancer is administered a sufficient amount of an immune cell transduced with both a CAR and a cleavage enzyme. In another aspect of the invention, a person diagnosed with cancer or at risk of developing cancer is administered a sufficient amount of an immune cell transduced with both a CAR and a cleavage enzyme, wherein the cleavage enzyme is on an inducible promoter that is activated by proteins that are expressed when the immune cell becomes activated. In another aspect of the invention, a person diagnosed with cancer or at risk of developing cancer is administered a sufficient amount of an immune cell transduced with both a CAR and a cleavage enzyme, wherein the cleavage enzyme is on an inducible promoter that is activated by one or more NFAT. In one case the NFAT is NFATc1. In another aspect, the NFAT is NFATc3. In another aspect, the NFAT is NFATc2. In any of the instances above, the extra cellular domain of the CAR comprises a fragment of an anti-MUC1* antibody. In one aspect, the anti-MUC1* antibody is MNC2scFv or a humanized form of MNC2scFv. In another aspect, the anti-MUC1* antibody is MNE6scFv or a humanized form of MNE6scFv. In any of the instances above, the immune cell can be a T cell, an NK cell, a mast cell, or a dendritic cell.

[0387] It is not intended that the present invention be limited to one or two specific methods of having expression of a cleavage enzyme induced by an activated T cell. We have demonstrated specific expression of a cleavage enzyme only upon T cell activation by constructing a plasmid with the cleavage enzyme gene downstream of an NFAT promoter sequence or downstream of one or more repeats of NFAT response elements. In another aspect of the invention, expression of the cleavage enzyme is induced by constructing a plasmid where the cleavage enzyme gene is inserted downstream of an IL-2 promoter sequence or downstream of an IL-2 response element, then inserting the plasmid into an immune cell. In another aspect of the invention, expression of the cleavage enzyme is induced by constructing a plasmid where the cleavage enzyme gene is inserted downstream of a Calcineurin promoter sequence or downstream of a Calcineurin response element, then inserting the plasmid into an immune cell and then administering to a patient for the treatment or prevention of cancers. There are also drug-inducible plasmids that can be used to induce expression of the cleavage enzyme or used to stop expression induced by an element of an activated T cell. These drug inducible systems may include tetracycline-inducible systems, Tet-on, Tet-off, tetracycline response elements, doxycycline, tamoxifen inducible systems, ecdysone inducible systems and the like.

[0388] It is not intended that the present invention be limited to one or two specific promoters used in the plasmids encoding the CARs or inducible cleavage enzymes. As is known by those skilled in the art, many promoters can be interchanged including SV40, PGK1, Ubc, CAG, TRE, UAS, Ac5, polyhedron, CaMKIIa, GAL1, GAL10, TEF1, GDS, ADH1, CaMV35S, Ubi, H1 and U6. Another solution to the problem of steric hindrance of CAR T cell access, caused by bulky cell surface proteins such as MUC1-FL, is to increase the length of the linker region of the CAR that is expressed by the T cell. In standard design CARs, the length of the extracellular linker region between the transmembrane portion and the antibody fragment is about 45-50 amino acids in length. We made long-arm CARs where the length of the extracellular linker is extended from about 50 amino acids to 217-290 amino acids. Co-culture assays show that CARs with longer extracellular linkers have improved access to the tumor-associated antigen on the target cancer cells. A cartoon of this strategy is shown in FIGS. 106A-106E.

[0389] Published reports of CARs generally use a linker between the transmembrane domain and the antibody fragment, scFv, that is 45-50 amino acids in length and is often the sequence of the extracellular domain of CD8. CAR 44 is an anti-MUC1* CAR whose linker is derived from CD8 extracellular domain and is 45 amino acids in length. To demonstrate that long-arm CARs enable the T cell greater access to tumor associated antigens near the cell surface, we made a series of CARS wherein the anti-MUC1* antibody fragment was MNC2 scFv (SEQ ID NO:655) which was connected to the transmembrane domain via a panel of linkers of variable length and flexibility, wherein the transmembrane domain was that of CD8 (SEQ ID NO:657), followed by co-stimulatory domain 4-1BB (SEQ ID NO:659) then CD3-zeta (SEQ ID NO:661). A panel of linkers were incorporated into this model CAR. An IgG1 Fc domain which is 232 amino acids in length (SEQ ID NO:663) was used as a linker for an MNC2 CAR (SEQ ID NO:665). An IgD Fc domain which is 290 amino acids in length (SEQ ID NO:667) was used as a linker for an MNC2 CAR (SEQ ID NO:669). An IgG1 hingeless Fc domain linker which is 217 amino acids in length (SEQ ID NO:671) was used as a linker for an MNC2 CAR (SEQ ID NO:673). An IgD hingeless Fc domain linker which is 275 amino acids in length (SEQ ID NO:675) was used as a linker for an MNC2 CAR (SEQ ID NO:677). An IgD linker which is 58 amino acids in length (SEQ ID NO:679) was used as a linker for an MNC2 CAR (SEQ ID NO:681). An X4 linker which is 43 amino acids in length (SEQ ID NO:683) was used as a linker for an MNC2 CAR (SEQ ID NO:685).

[0390] These CARs with variable length linkers between the scFv and the transmembrane domain are: CAR15: huE6-IgD-CD8-41BB-3z (SEQ ID NO: 324); CAR16: muE6-IgD-CD8-41BB-3z (SEQ ID NO: 823); CAR17: muC2IgD-CD8-41BB-3z (SEQ ID NO: 825); CAR18: huE6-Fc-CD8-41BB-3z (SEQ ID NO: 311); CAR19: huE6-FcH-CD8-41BB-3z (SEQ ID NO: 316); CAR20: huE6-X4-CD8-41BB-3z (SEQ ID NO: 330); CAR33: huE6-IgD-CD441BB-3z (SEQ ID NO: 327); CAR34: huE6-Fc-CD441BB-3z (SEQ ID NO: 319); CAR35: huE6-FcH-CD441BB-3z (SEQ ID NO: 321); CAR36: huE6-X4-CD441BB-3z (SEQ ID NO: 334); CAR39: muE6-CD28-CD28-CD28-3z (SEQ ID NO: 827); CAR40: muC2-CD28-CD28-CD28-3z (SEQ ID NO: 829); CAR53: huC2-Fc-CD8-41BB-3z (SEQ ID NO: 665 and 733); CAR54: huC2-IgD+Fc-CD8-41BB-3z (SEQ ID NO: 669 and 735); CAR55: huC2-FcH-CD8-41BB-3z (SEQ ID NO: 673 and 737); CAR56: huC2-IgD+FcH-CD8-41BB-3z (SEQ ID NO: 677 and 739); CAR57: huC2-IgD-CD8-41BB-3z (SEQ ID NO: 681 and 741); CAR58: huC2-X4-CD8-41BB-3z (SEQ ID NO: 685 and 743); CAR63: huE6-IgD+Fc-CD8-41BB-3z (SEQ ID NO: 771); CAR64: huE6-IgD+FcH-CD8-41BB-3z (SEQ ID NO: 773); CAR42: hu a-CD19-IgD-CD8-41BB-3z (SEQ ID NO: 831). Additional details regarding these long linker CARs are shown in Table 1. Table 2 shows experimental activity of some of the CARs when transduced into human T cells and co-cultured with cancer cells.

[0391] In co-culture experiments, anti-MUC1* CARs with extracellular domain linkers of varying lengths were tested for their ability to specifically kill target MUC1/MUC1* positive cancer cells. xCELLigence scans shown in FIGS. 107A-107B show the results of one experiment. In this experiment the long linker CARs were transduced into human T cells then co-cultured with T47D breast cancer cells. However, some of the CARs that appear not to effectively kill the target cancer cells may just not have been efficiently expressed. Another experiment was performed in order to separate CAR expression from CAR efficacy. HEK293 adherent cells were transduced with a panel of CARs each having different length linkers. The CAR plasmid also carried a GFP marker so expression of each CAR could be measured by the amount of cells that were green. To these cells were added K562 suspension cells that had been stably transfected with MUC1*. K562-MUC1* cells were stained with a red dye, CMTMR. After wash steps, the amount of cells that were yellow (green plus red) indicates the ability of each of the CARs to recognize the target tumor antigen on a cancer cell. As can be seen in FIGS. 108A-108H, the expression levels of the CARs varies greatly. However, expression levels are easily optimized so does not constitute a problem. In looking at FIGS. 1081-108P the number of cells that appear yellow, versus those that remain green, gives more information about which CAR linkers are best to overcome steric hindrance of other surface molecules on the target cancer cells. A significant amount of target cancer cells bound to CAR-expressing cells for CARs having linkers derived from CD8, IgG1 FcH (hingeless), IgD and IgDFcH (hingeless). In addition to length, the linkers tested in these CARs are expected to vary in their rigidity.

[0392] Table 2 shows cytokine release data for human T cells transfected with some of the long linker CARs.

[0393] We note that “long-arm” CARs that have increased efficacy against solid tumor cancers can be guided by any antibody fragment that recognizes a tumor associated antigen, including MNE6 scFv, MNC2-scFv and other anti-MUC1* antibody fragments. Similarly, the transmembrane portion of the long-arm CARs can be derived from CD8, CD4 or other transmembrane domain. The intracellular tail of the CAR can be comprised of CD3-zeta and any other co-stimulatory domains or combinations thereof including CD28, 4-1BB, and OX40.

[0394] In another aspect, the invention is directed to a composition that includes at least two different plasmids transfected into the same immune cell, wherein the first encodes a CAR comprising an antibody fragment, scFv, or peptide that binds to a tumor antigen and the other encodes a gene that is not a CAR, wherein the gene that is not a CAR is expressed from an inducible promoter that is activated by elements of an activated immune cell. In one aspect, the immune cell is a T cell or an NK cell. In one aspect the CAR comprises an antibody fragment, scFv or peptide that binds to the extra cellular domain of MUC1*. In one aspect the CAR comprises an scFv derived from MNC2, MNE6, MNC3 or MNC8. In one aspect the non-CAR species is a cleavage enzyme. In one aspect the cleavage enzyme is MMP2, MMP3, MMP9, MMP13, MMP14, MMP16, ADAM10, ADAM17, ADAM28 or catalytically active fragments thereof. In another aspect the non-CAR species is a cytokine. In one aspect, the Cytokine is IL-7. In one aspect the cytokine is IL-15. In one aspect the cytokine is IL-12. In one aspect the cytokine is IL-18. In another aspect the cytokine is IL-7 and IL-15. In one case expression of the non-CAR species is induced by elements of an activated immune cell. In one aspect the element of an activated immune cell is an NFAT. In one aspect the NFAT is NFATc1, NFATc3 or NFATc2. Cytokines IL-7, IL-15, IL-12 and IL-18 are known to promote T cell persistence. In one aspect of the invention an immune cell described above is administered to a patient for the treatment or prevention of cancer. In one aspect of the invention, the cancer is a MUC1 positive cancer or a MUC1* positive cancer.

[0395] In another aspect, the invention is directed to a composition that includes at least two different plasmids transfected into the same immune cell, wherein the first encodes a CAR comprising an antibody fragment, scFv or peptide that binds to the extra cellular domain of an antigen on the surface of a B cell and the other encodes a gene that is not a CAR, wherein the gene that is not a CAR is expressed from an inducible promoter that is activated by elements of an activated immune cell. In one aspect, the immune cell is a T cell or an NK cell. In one aspect the CAR comprises an antibody fragment, scFv or peptide that binds to CD19. In one aspect the CAR comprises sequences derived from SEQ ID NO:830-831. In another aspect the antibody fragment, scFv or peptide binds to a surface antigen of a B cell or a B cell prescursor, or binds to CD19, CD20, CD22, BCMA, CD30, CD138, CD123, CD33 or LeY antigen. In one aspect the non-CAR species is a cleavage enzyme. In another aspect the non-CAR species is a cytokine. In one aspect, the Cytokine is IL-7. In one aspect the cytokine is IL-15. In another aspect the cytokine is IL-7 and IL-15. In one case expression of the non-CAR species is induced by elements of an activated immune cell. In one aspect the element of an activated immune cell is an NFAT. In one aspect the NFAT is NFATc1, NFATc3 or NFATc2. that is not a CAR, wherein the gene that is not a CAR is expressed from an inducible promoter wherein expression is induced by elements of an activated immune cell. In one aspect the immune cell transfected or transduced with the composition is administered to a patient for the treatment or prevention of cancer. In one case the cancer is a leukemia, lymphoma or blood cancer.

[0396] It is not intended for the invention to be limited by a specific method or technology for inserting the gene or plasmid comprising a sequence encoding a CAR or activated T cell inducible protein or peptide there encoded. For example, the gene encoding the CARs and activated T cell induced genes described herein can be virally transduced into an immune cell using viruses, which may or may not result in the CAR gene being integrated into the genome of the recipient cell. Virus delivery systems and viral vectors include but are not limited to retroviruses, including gamma-retroviruses, lentivirus, adenoviruses, adeno-associated viruses, baculoviruses, poxvirus, herpes simplex viruses, oncolytic viruses, HF10, T-Vec and the like. In addition to viral transduction, CARs and activated T cell induced genes described herein can be directly spliced into the genome of the recipient cell using methods such as CRISPR technology, CRISPR-Cas9 and -CPF1, TALEN, Sleeping Beauty transposon system, and SB 100×.

[0397] Bulky cell surface proteins such as MUC1-FL can also cause a steric hindrance problem for BiTEs. A BiTE is a two-headed bi-specific antibody wherein one head binds to a T cell and the other head binds to a tumor-associated antigen. In this way, the BiTE links together the T cell and the tumor cells. The antibody that binds to the T cell should be an antibody that activates the T cell, such as an antibody against CD3 such as OKT3 scFv (SEQ ID NO:687) or CD28. To solve the steric hindrance problem, the linker between the T cell specific antibody and the tumor specific antibody is lengthened. Examples of BiTEs with extended linkers Anti-CD3-linker-anti-MUC1*, are shown as SEQ ID NOS:689, 691, 693, 695, 697, and 699.

[0398] In another aspect of the invention, an anti-MUC1* single chain molecule is fused to a cleavage enzyme or a catalytically active fragment of a cleavage enzyme. In one aspect of the invention, the cleavage enzyme is MMP9 (SEQ ID NO:701). In another aspect of the invention, the enzyme is a catalytically active fragment of MMP9 (SEQ ID NO:703). In some cases, the antibody fragment of the CAR is chosen for its ability to recognize MUC1* when cleaved by that specific cleavage enzyme. In one embodiment, the cleavage enzyme is MMP9, MMP3, MMP14, MMP2, ADAM17, ADAM TS16, and/or ADAM28. In one embodiment, the antibody or antibody fragment binds to a peptide having the sequence of SEQ ID NO:2 (PSMGFR) GTINVHDVETQFNQYKTEAASRYNLTISDVSVSDVPFPFSAQSGA, PSMGFR N-10, QFNQYKTEAASRYNLTISDVSVSDVPFPFSAQSGA, or PSMGFR N+18 SNIKFRPGSVVVQLTLAFREGTINVHDVETQFNQYKTEAASRYNLTISDVSVSDVPFPFSAQS GA. “PSMGFR N+18” refers to a fragment of MUC1 receptor in which 18 amino acid residues have been added at the N-terminal end of PSMGFR segment within the MUC1 receptor of SEQ ID NO:1. In another embodiment, cleavage enzymes MMP9 and MMP3 are transduced into a T cell that is also transduced with a CAR with an antibody fragment that is a fragment of MNC2.

[0399] In many cases it is desirable to have the cleavage enzyme expressed only after an immune cell recognizes the tumor-associated target on a solid tumor. In this way, the cleavage enzyme will not freely move throughout the body, cleaving MUC1, MUC16 or other proteins, wherein their cleavage could actually promote cancer. However, there are cancers that are physically accessible to direct application of chemotherapy agents, CAR T cells and other anti-cancer agents. For example, types of brain cancers, prostate cancer and ovarian cancers have all shown the benefit of direct application of anti-cancer agents into the local vicinity of the cancer. CAR T cells have been injected directly into the brain and/or cerebral spinal fluid of glioblastoma patients. Radiation has been directed to the prostate area for the treatment of prostate cancers, including those that have metastasized. Hot chemo therapy agents have been directly injected into the intraperitoneal cavity for the treatment of ovarian cancers. In these and other cases, where the cancers that are physically accessible to direct application of chemotherapy agents, a cleavage enzyme is administered in the presence or absence of another anti-cancer agent, which could be a CAR T cell, an immune cell engineered to recognize a tumor-associated antigen, a BiTE, an ADC, a biological or a standard chemotherapy agent. Although ovarian cancer can metastasize to anywhere in the body, it usually stays in the abdomen as it spreads to adjacent organs, such as the intestines, liver and stomach. This makes ovarian cancer an ideal test case for improving the effect of anti-cancer agents by administering a cleavage enzyme in combination with other anti-cancer agents, including a platinum-based drug such as carboplatin (Paraplatin) or cisplatin, and/or a taxane such as paclitaxel (Taxol) or docetaxel (Taxotere). Alkeran (Melphalan), Avastin (Bevacizumab), Carboplatin, Clafen (Cyclophosphamide), and Cytoxan have all been approved for the treatment of ovarian cancer. Other treatments that are being tested for the treatment of ovarian cancers include agents that target MUC1, MUC16 and as described herein, MUC1*.

[0400] As a demonstration of the efficacy of the addition of a cleavage enzyme, we implanted NOD/SCID/GAMMA mice with human SKOV-3 ovarian cancer cells into the intraperitoneal cavity to mimic ovarian cancer that has spread beyond the ovary. Mice were treated with anti-MUC1* CAR T cells both by intraperitoneal (i.p.) and by intravenous (i.v.) injection. FIG. 109 indicates the days when mice were treated with anti-MUC1* CAR T and the route(s) of administration. At Day 21 post-implantation, the anti-MUC1* CAR T treated mice had the lowest tumor measurements. The average tumor IVIS measurement in photons/see/cm3×10⁶ for CAR T treated mice was 3.9, compared to 7.06 for mice treated with untransduced T cells, and 33.5 for PBS group. However, tumor growth began to increase rather than decrease around this time. Four days later at Day 25, CAR T treated mice had an average tumor measurement of 4.7, a 21% increase, compared to 14.24 and 62.3 for untransduced T cells and PBS, respectively, which is a doubling in four days. By Day 49, the tumors had grown sufficiently large that the animals would soon need to be sacrificed. On Day 53, 4 ug of a catalytically active fragment of MMP9 was i.p. administered to CAR T treated mice, along with 10 million anti-MUC1* CAR T cells. Mice in the control groups were treated with untransduced T cells or PBS in the same quantity and volume. On Day 56 IVIS tumor measurements showed that of the 5 mice treated with CAR T cells and MMP9, one had a 99.5% decrease in tumor burden, the second had a 92.4% decrease, a third had a 47% decrease, the fourth had no change and the fifth mouse in that group had no detectable tumor on Day 49 or 56. The effect of the MMP9 is clear, especially when compared to the control groups over the same time period. The untransduced mice and the PBS treated mice, from Day 49 to Day 56, had average increases in tumor volume of 118% and 127%, respectively (FIG. 109 and FIG. 110).

[0401] Other cleavage enzymes can be used in addition to or in place of MMP9. MMP14 for example, has been shown to efficiently cleave MUC1 to MUC1* (FIG. 111). In one aspect of the invention, MMP14 is expressed in an immune cell that is also engineered to express a CAR. In one case the CAR is an anti-MUC1* CAR. For example, it can be an MNC2-CAR44 transduced T cell. In another aspect of the invention, the MMP14 is directly administered to the patient either in the location of the tumor or by i.v.

[0402] In yet another aspect of the invention, the cancer is an ovarian cancer and either MMP9 or MMP14 is directly injected into the abdominal area along with an anti-cancer agent, which can be a chemotherapy agent, a biological, an anti-MUC1* CAR T or an anti-MUC16 CAR T.

[0403] In addition to local administration of the cleavage enzyme, +iv administration alone or secreted from an immune cell, which may be a CAR T cell, which further may be expressed off of an inducible promoter is contemplated.

### Methods Used in Carrying Out Experimentation in Relation to the Present Invention

### 1. Lentivirus Production and Viral Transduction of Immune Cells

[0404] HEK293 or HEK293T cells (ATCC) were used to produce lentivirus. The day prior transfection plates (6 well plate) were coated with poly-D-lysine and cells seeded so that cell density reaches 90-95% at the time of transfection and cultures in a 5% CO2 atmosphere. The next day cells were transfected with Lipofectamine 3000 (life technologies) and Opti-MEM® I Reduced Serum Medium according to the manufacturer instructions (0.75 ug of lentiviral expression vector and 2.25 ug of pPACKH1 packaging mix was used). After 6 h incubation, the media was changed and media containing lentivirus was harvested after 24 and 48 hours. Lentivirus was concentrated with Lenti-X concentrator (Clontech) and titer was calculated using the Lenti-X p@4 Rapid Titer Kit (Clontech). Lentivirus was store at −80 C in single-use aliquots.

Transduction of Immune Cells with Constructs Including CARs

[0405] Human T cells, if frozen, were thawed and pre-warmed in 100-200 units IL-2 and TexMACS medium, 20 ml, and pelleted by centrifugation. Cells were resuspended in 10 ml of medium and cultured at 37° C., 5% CO₂ at 1×10⁶ cells/ml in complete medium with anti-CD3/anti-CD28 beads (TransAct kit).

[0406] After 4 days in culture, cells were counted and 450 ul of cell suspension was placed in single well of a 24-well plate at a density of approximately 1×10⁶ cells/ml. Cells were allowed to settle. 150 ul was carefully removed from the top of each well. To each well was added an appropriate dilution of lentiviral vector, diluted in plain TexMACS medium, along with protamine sulfate to a final concentration of 10 ug/ml, in a 150 ul volume, for a final total volume of 450 ul per well and incubated for 24 hrs. Transduced cells were removed, pelleted by centrifugation, and resuspended in fresh medium, adjusting cell density, not to exceed 1.0×10⁶ cells/ml. Transduced T cells can be expanded and frozen or used directly. Typically transduced T cells are used or frozen between Day 7 and Day 20 post activation with IL-2 and TransAct media.

### 2. Comparing CAR T Cell Activity Among Several Anti-MUC1* CARs

[0407] Human T cells (ALLCELLS) were transduced with anti-MUC1* CAR18, CAR19, CAR44, CAR49, CAR44 and CAR49 or CAR50. The CAR constructs all had a GFP marker so that CAR T cells are green and untransduced T cells (FIG. 80A) are clear. CAR18 is huMNE6scFv-Fc-CD8-41BB-3z. CAR19 is the same except instead of a portion of an Fc region for the linker between scFv and transmembrane region, CAR19 has an Fc region with the hinge portion mutated out. CAR44 is huMNC2-scFv-CD8-CD8 (transmembrane-41BB-3z). CAR49 is the same as CAR44 except that CAR44 has a CD8 leader sequence and CAR49 has an IgK leader sequence. CAR50 is the same as CAR44 except that CAR50 has a murine MNC2-scFv and a CD4 transmembrane domain. Table 1 gives details of each CAR construct. The CAR T cells were then incubated for 18 hours with HCT-MUC1* cancer cells that had been stably transfected with mCherry (red). When T cells recognize a target cell, they cluster the target cells and begin to kill them. As can be seen in FIGS. 80A-80F the green CAR T cells are effectively clustering and killing the target MUC1* positive cancer cells.

3. Confocal Imaging of CAR T Cells Giving the “Kiss of Death” to MUC1* Positive Cancer cells.

[0408] Human T cells that were transduced with CAR44 were co-cultured for 24 hours with MUC1* positive cancer cells that were stably transfected with GFP (green). All of the cells were stained with DAPI (blue). Granzyme B was stained with a fluorophore. After T cell activation, they express perforin that is thought to make a hole in the target cancer cells. The T cell then injects the cancer cell with granzyme B (yellow) which then induces apoptotic pathways, resulting in cancer cell lysis. FIGS. 81A-81D show photographs of human huMNC2-CAR44 T cells injecting granzyme B (yellow) into MUC1* positive and GFP positive (green) DU145 prostate cancer cells. FIG. 81A is a 4× magnified photograph. FIG. 81B is a 20× magnified photograph. FIG. 81C is a 20× magnified photograph. FIG. 81D is a 40× magnified photograph.

### 5. Analysis of CAR T Cell Induced Killing of MUC1* Positive Cancer Cells by FACS Analysis

[0409] FIGS. 82A-82B show the killing effect of huMNC2-CAR44 T cells on T47D MUC1* positive breast cancer cells, wherein the breast cancer cells have been transfected with increasing amounts of additional MUC1*. As can be seen, the killing effect of the huMNC2-CAR44 T cells increases as the amount of target MUC1* expressed on the cells increases. FIG. 82A is a graph of target cell killing as measured by FACS. FIG. 82B is a graph of an ELISA assay in which the supernatant from the huMNC2-CAR44 T cells in co-culture with the T47D cells is probed for the presence of secreted interferon gamma, which is a sign of T cell activation.

[0410] There are many methods for analyzing cytotoxicity by FACS. In this example, human T cells were isolated from whole blood according to standard protocols. The T cells were then separately transduced twice with lenti virus bearing the CAR constructs, wherein the CAR constructs bear a GFP tag. Following 2-3 days of culture in RPMI 10% FBS and IL-2, the cells were stained with F(ab′)2 to label surface expression of MN-E6, MN-C2, MN-C3 and MN-C8. Cells were then sorted by flow cytometry for Fab-positive, GFP-positive cells. That means that the double positive population had a CAR inserted and that the CAR exposed the correct antibody fragment. The CAR T cells were then ready to be mixed with the MUC1* negative control cells or the target MUC1* positive cancer cells.

[0411] The target cells were prepared as follows: Harvest target cells and resuspend cells in serum-free medium containing 15 uM of CMTMr dye (Cell Tracker Orange, 5-and-6-4-chloromethyl benzoyl amino tetramethylrhodamine, Thermo Fisher) at 1-1.5×10⁶ cells/mL. Incubate 30 min under growth conditions appropriate to particular cell type. Wash in culture media and transfer stained cells to a new tube and incubate the cells 60 min in media. Wash 2 more times in culture media to get rid of all excess dye. Set up the assay in 24 well plates with 0.5 ml media total volume. Resuspend the target cells (and control target cells) so that there are always 20,000 cells per well (20,000 cells/250 ul). Plate 250ul in each well. Add 250ul of the T cells so that the ratio of T cell: target cells=20:1, 10:1, 5:1 or 1:1. Analyse cells after 24 h and 72 h. For suspension target cells, take off the 0.5 ml media from the well and place in tube, wash the well with 0.5 ml media or PBS. For adherent target cells, take off the 0.5 ml media from the well and place in tube, wash the well with 0.5 ml PBS. Add the PBS to the same tube and add 120ul trypsin to the well. Incubate for 4 min then add 0.5 ml media to neutralize trypsin and place that in the tube as well. Spin cells and resuspend pellet in 100ul FACS buffer. Spin cells again. Resuspend cells in 100ul buffer+5ul anti-CD3 antibody, for 30 min on ice (to stain T cells). After 30 min, wash stained cells 2× with FACS buffer and resuspend in 250ul buffer. Run the cells through the filter cap of the FACS tube. 10 min prior to analysis, add 10ul 7AAD dye to each tube and analyze with Fortessa under the Cytotoxicity template. FIGS. 83A-83D show the results of FACS analysis of huMNC2-CAR44 T cells after 24 hours of co-culture with MUC1* positive cancer cells. FIG. 83A is a graph of FACS data showing the percentage of T47D cancer cells that were killed by huMNC2-CAR44 T cells (blue bars), compared to untransduced T cells (red bars). The X-axis shows the ratio of T cells to cancer cells. FIG. 83B is a graph of FACS data showing the percentage of K562-MUC1* cancer cells that were killed by huMNC2-CAR44 T cells (blue bars), compared to untransduced T cells (red bars). FIG. 83C shows the FACS scans wherein the T47D breast cancer cells were stained with the dye CMTMR. Sytox blue is a dead cell stain. Dead cancer cells are those in quadrants 2 and 3. FIG. 83D shows the FACS scans wherein the K562-MUC1* cancer cells were stained with the dye CMTMR. Sytox blue is a dead cell stain. Dead cancer cells are those in quadrants 2 and 3.

[0412] IFN-γ secretion in media was measured using a human IFN-γ ELISA kit (Biolegend). Plates were coated with an anti-IFN-γ antibody (capture antibody, 1× in coating buffer). After overnight incubation at 4° C., the plate was washed 4 times with PBS-T and blocking solution was added to block remaining binding site on the well. After 1 h at RT (shaking at 500 rpm) the plate was washed 4 times with PBS-T and conditioned media (CM) and IFN-γ standard, was added. After 2 h at RT with shaking, the plate was washed 4 times with PBS-T and detection antibody (1×), was added. After 1 h at RT with shaking, the plate was washed 4 times with PBS-T and Avidin-HRP (1×) was added. After 30 min at RT with shaking, the plate was washed 5 times with PBS-T (soak 1 min each wash) and TMB substrate solution was added. The reaction was stopped after 20 min by adding the stop solution and absorbance was read at 450 nm (minus absorbance at 570 nm) within 15 min of stopping.

6. Analysis of CAR T Cell Induced Killing of MUC1* Positive Cancer Cells by xCELLigence

[0413] In addition to FACS analysis, many researchers now use an xCELLigence instrument to measure CAR T killing of cancer cells. The xCELLigence instrument uses electrode arrays upon which cancer cells are plated. The adherent cancer cells insulate the electrode and so cause an increase in impedance as they grow. Conversely, T cells are not adherent and remain in suspension so do not contribute to insulation of the electrode which would increase impedance. However, if the T cells or CAR T cells kill the cancer cells on the electrode plate, the cancer cells ball up and float off as they die, which causes the impedance to decrease. The xCELLigence instrument measures impedance as a function of time, which is correlated to cancer cell killing. In addition, the electrode plates also have a viewing window. When CAR T cells effectively kill the adsorbed target cancer cells, there is a decrease in impedance but also one can see that there are no cancer cells left on the plate surface.

[0414] In most of the XCELLigence experiments, 5,000 cancer cells were plated per well of a 96-well electrode array plate. Cells were allowed to adhere and grow for 24 hours. CAR T cells were then added at an Effector to Target ratio (E:T) of 0.5:1, 1:1, 2:1, 5:1, 10:1 and sometimes 20:1. The E:T ratio assumes 100% transduction of the CAR into the T cells, when the actual transduction efficiency is 40%.

[0415] The xCELLigence instrument records impedance as a function of time and experiments can go on for up to 7 days.

[0416] FIG. 78, FIG. 79, FIG. 84H, FIG. 85H, FIGS. 86A-86C, FIGS. 89A-89C, FIGS. 90A-90D, and FIGS. 107A-107B all show results of CAR T and cancer cell experiments performed on an xCELLigence instrument.

### 7. Anti-MUC1* CAR T Cell Therapy in Mice Bearing Human Tumors

[0417] Female NOD/SCID/GAMMA (NSG) mice between 8-12 weeks of age were implanted with 500,000 human cancer cells, wherein the cancer cells had previously been stably transfected with Luciferase. Mice bearing Luciferase positive cells can be injected with the enzyme's substrate Luciferin just prior to imaging, which makes the cancer cells fluoresce. The cancer cells are imaged in live mice within 10-15 minutes after injection with Luciferin on an IVIS instrument. The readout is flux or photons per second. Tumors were allowed to engraft until tumors were clearly visible by IVIS.

[0418] FIGS. 91A-91Y show fluorescent photographs of mice taken on an IVIS instrument. NSG (NOD/SCID/GAMMA) immune compromised mice that on Day 0 were subcutaneously implanted on the flank with 500,000 human MUC1* positive cancer cells that had been stably transfected with Luciferase. Tumors were allowed to engraft. On Day 5 after IVIS measurement and on Day 12, animals were injected with 10 million of either human T cells transduced with huMNC2-scFv-CAR44, untransduced T cells or PBS. 5 million T cells were injected intra-tumor and 5 million T cells were injected into the tail vein. 10 minutes prior to IVIS photographs, mice were injected intraperitoneally (IP) with Luciferin, which fluoresces after cleavage by Luciferase, thus making tumor cells fluoresce.

[0419] FIGS. 92A-92J show fluorescent photographs of mice taken on an IVIS instrument. NSG (NOD/SCID/GAMMA) immune compromised mice that on Day 0 were subcutaneously injected into the flank with 500K human BT-20 cells which are a MUC1* positive triple negative breast cancer cell line. The cancer cells had been stably transfected with Luciferase. Tumors were allowed to engraft. On Day 6 after IVIS measurement, animals were given a one-time injection of 10 million of either human T cells transduced with huMNC2-scFv-CAR44 or untransduced T cells. 5 million T cells were injected intra-tumor and 5 million were injected into the tail vein. 10 minutes prior to IVIS photographs, mice were IP injected with Luciferin.

[0420] FIGS. 93A-93H show fluorescent photographs of mice taken on an IVIS instrument. NSG (NOD/SCID/GAMMA) immune compromised mice that on Day 0 were injected into the intraperitoneal cavity (IP) with 500K human SKOV-3 cells which are a MUC1* positive ovarian cancer cell line. The cancer cells had been stably transfected with Luciferase. Tumors were allowed to engraft. On Day 3 after IVIS measurement, animals were IP injected with 10M either human T cells transduced with huMNC2-scFv-CAR44, untransduced T cells or PBS. Animals were IVIS imaged again on Day 7. 10 minutes prior to IVIS photographs, mice were IP injected with Luciferin.

### 8. Confocal Analysis of MMP9 Treated Cells

[0421] HCT-MUC1-41TR also known as HCT-MUC1-18 cells that stably express MUC1 full length were seeded in 6 channel u-slide VI 0.4 (Ibidi, WI) in DMEM+10% FCS. 48 h later, cells were washed with 120 uL of PBS pH 7.4 and MMP9 catalytic domain (Enzo Life Sciences, NY), diluted in serum free medium (DMEM), was added at different concentrations (40 uL at 0, 12.5, 25, 50 and 100 ng/mL). After 1 h at 37° C. in a CO₂ incubator, cells were washed twice with 120 uL of cold PBS pH 7.4 and fixed for 8 min in 4% PFA (30 uL). Cells were washed 3 times with cold PBS pH 7.4 and blocked with a 5% BSA solution in PBS pH 7.4 (40 uL) for 30 min at 4° C. (with shaking). After washing cells with cold PBS pH 7.4 (1×), cells were incubated overnight at 4° C. (with shaking) with 125 ug/mL of MNC2 diluted in PBS pH 7.4 (100 uL). Next day, cells were washed 3× with 120 uL of PBS pH 7.4 and incubated 2 h at 4° C. (with shaking) with goat anti-mouse IgG PE (Biolegend, CA) diluted in PBS pH 7.4 (100 uL, 1:200). After incubation, cells were washed 1× with 120 uL of PBS pH 7.4 and 2× with 120 uL of PBS pH 7.4+2.5 uM Hoechst 33342. Finally, cells were mounted with Ibidi mounting media (Ibidi, WI). Results show that addition of MMP9 induced cleavage of full-length MUC1 to a MUC1* form that was recognized by anti-MUC1* monoclonal antibody MNC2 (FIG. 96A-96E). This shows that MMP9 cleaves MUC1 at a site that is recognized by MNC2.

### 9. NFAT-Induced MMP9 Catalytic Domain Expression

[0422] Vectors containing either 4 repeats of a NFAT response element or the NFATc1 promoter followed by the MMP9 catalytic domain were transiently transfected into HEK293TN cells (System Biosciences, CA) with Lipofectamine 3000 (ThermoFisher Scientific, MA) according the manufacturer manual. After 24-30 h, media was changed to DMEM+1% FBS+10 ng/mL PMA (Cayman Chemical, MI) and Ionomycin (1-6 uM, Cayman Chemical, MI). Media and cells were collected after 18 h incubation for analysis.

[0423] Expression and secretion of MMP9 was confirmed by Western blot analysis of the cell lysates and conditioned media according to the following protocols. Cells were lysed for 20 min on ice with lysis buffer (50 mM Tris, 150 mM NaCl and 1% Triton X100). For Western blot, 100 ug of protein were separated by gel electrophoresis (4-15% Mini-PROTEAN® TGX™ Precast Protein Gels, BioRad, CA) followed by transfer to PVDF membrane (BioRad, CA). The membrane was briefly rinsed with PBS-T and then blocked for 1 h at room temperature with a solution of 3% non-fat milk (BioRad, CA). For Flag tagged protein, the membrane was quickly washed and incubated with a rabbit anti-DYKDDDDK epitope Tag antibody (Biolegend, CA) was diluted in 1% non-fat milk (1:2000) for 2 h at room temperature. For His tagged protein, the membrane was quickly washed and incubated with a rabbit anti-6×His tag antibody HRP (Abcam, MA) diluted in 1% non-fat milk (1:10000) for 1 h at room temperature. For Flag tagged protein, the membrane was then washed 3 times for 10 min with PBS-T and incubated with goat anti-Rabbit HRP antibody diluted in 1% non-fat milk (1:2500) for 1 h at room temperature. For His tagged protein and after the secondary antibody incubation for the Flag tagged protein, the membrane was processed after being washed 3 times for 10 min with PBS-T using Clarity™ Western ECL Substrate (BioRad, CA).

[0424] In some cases, the protein was first immunoprecipitated before analysis. Flag tagged MMP9 catalytic domain was immunoprecipitated from conditioned media (˜2 mL) using an anti-DYKDDDDK Tag (L5) affinity gel (Biolegend, CA) according to manufacturer manual. Pull down proteins were used for Western blot analysis or cleavage assay.

[0425] FIGS. 98A-98F are photographs of Western blots of cell lysates probed with an antibody that recognizes the MMP9 construct that was transfected. A plasmid was constructed then transfected into HEK293T cells, wherein the gene for MMP9 catalytic domain was inserted downstream of either 3 or 4 NFAT response elements. The NFAT pathway was activated by the addition of PMA at 10 ng/ml and Ionomycin at either 1 uM or 2 uM, except in control (ctl) cells. Pulldown was done using beads to which were coupled an antibody that recognizes a Flag tag that was incorporated at the C-terminus of the MMP9 construct. Lane 1 shows a molecular weight control. Lanes 2, 3, 4 and 5 show MMP9 that was eluted from the anti-Flag tag beads. Lanes 2 and 3 were first elutions and the cells shown in Lanes 4 and 5 were second elutions. Into Lanes 2 and 4 were loaded conditioned media from cells in which the NFAT pathway had been activated with PMA 10 ng/ml and Ionomycin at luM. Into Lanes 3 and 5 were loaded conditioned media from cells in which the NFAT pathway had been activated with PMA 10 ng/mL and Ionomycin at 2 uM.

[0426] FIGS. 100A-100E show NFAT-induced MMP9 catalytic domain expressed in HEK293T cells wherein the native leader sequence of MMP9 has been replaced by an IgK leader sequence and MMP9 catalytic domain is downstream of 4 repeats of an NFAT response element. FIG. 100A shows photograph of Western blot detecting expression of MMP9 in the cell lysate after activation of the NFAT pathway. FIG. 100B shows photograph of Western blot detecting expression of MMP9 in the conditioned media after activation of the NFAT pathway.

[0427] FIGS. 101A-101E show MMP9 can be expressed with different leader sequences and also show subsequent activity of each. FIG. 101A shows a Western blot detecting an MMP9 protein in cell lysate wherein the leader sequence upstream of the MMP9 gene is either its native sequence or an IgK sequence. FIG. 101B shows a Western blot detecting MMP9 in conditioned media wherein the leader sequence upstream of the MMP9 gene is its native sequence or an IgK.

[0428] FIGS. 102A-102D show three (3) clones 4, 6 and 7 of cells transfected with a plasmid that produces an NFAT inducible MMP9 wherein the NFATc1 promoter sequence is upstream of the MMP9 gene, which in this case is a truncated MMP9 comprising its catalytic domain. Also shown for comparison is a cell transfected with a plasmid that produces an NFAT inducible MMP9 wherein 4 repeats of an NFAT response element sequence are upstream of an MMP9 gene. FIG. 102A shows a Western blot detecting an MMP9 protein in cell lysate. FIG. 102B shows a Western blot detecting MMP9 in the conditioned media.

[0429] FIGS. 105A-105E show photographs of Western blots of human T cells transduced with either CAR44 alone, NFAT-inducible MMP9 alone or transduced with both CAR44 and NFAT-inducible MMP9, wherein the resultant T cells are either not activated, chemically activated by PMA/Ionomycin, activated by co-culturing with beads presenting synthetic MUC1* peptide or co-culturing with MUC1* positive cancer cells. Western blot was probed with an anti-Flag tag also known as DYK tag antibody. Catalytic domain of MMP9 runs with an apparent molecular weight of about 40 kDa. FIGS. 105A-105D show photographs of Western blots of cleared cell lysates. Results show that T cells transduced with NFAT-inducible MMP9 only express MMP9 when they are activated by PMA/Ionomycin, MUC1* beads or MUC1* positive cancer cells. T cells transduced with both CAR44 and NFAT-inducible MMP9 only express MMP9 when the T cells are activated by stimulation with MUC1* beads or with MUC1* positive cancer cells.

[0430] Results show that T cells transduced with NFAT-inducible MMP9 express MMP9 when they are activated. T cells transduced with both CAR44 and NFAT-inducible MMP9 are specifically activated when they are co-cultured with beads or cells presenting or expressing MUC1* (FIG. 105A Lane 5 and Lane 6).

### 10. Fluorogenic MMP Peptide Substrate Cleavage Assay

[0431] OMNIMMP fluorogenic substrate (Enzo life sciences, NY) was diluted to 20 uM in assay buffer (50 mM Tris pH 7.5, 300 mM NaCl, 1 mM CaCl2, 5 uM Zncl2, 0.1% Brj-35 and 15% glycerol) and kept on ice and protected from light until used. Peptide can also be diluted in PBS pH 7.4 or culture medium. Cell lysate was diluted to 0.4 mg/mL is assay buffer (or PBS pH 7.4 or culture medium). For the assay, 50 uL of recombinant MMP9 catalytic domain (1-2 ug/mL in assay buffer, PBS pH 7.4 or culture medium), 50 uL of diluted cell lysate, 50 uL of conditioned media or 50 uL of pulled down protein was added to wells of a 96 well plate compatible with fluorometer. Just before starting the assay, 50 uL of diluted peptide was added to each well and quickly mixed (final peptide concentration is 10 uM). Fluorescence was recorded every 10 min for about 6 h at 37° C. (Ex.: 328 nm, Em.: 393 nm).

[0432] FIG. 97 shows a graph of a fluorogenic peptide substrate of MMP9, the OMNIMMP peptide, being cleaved by MMP9 catalytic domain at two concentrations in either PBS, solid trace, or cell culture media, dashed trace.

[0433] FIGS. 99A-99C show graphs of a fluorogenic peptide, OMNIMMP peptide, substrate of MMP9 being cleaved by the cell lysate or conditioned media of HEK293T cells that were transfected with a plasmid containing an MMP9 gene downstream from 4 repeats of an NFAT response element. The MMP9 peptide substrate assay shows that activation of the NFAT pathway by PMA/ionomycin caused an MMP9 to be expressed and secreted and that it was active as evidenced by its ability to cleave a peptide substrate.

[0434] FIG. 100C shows graph of MMP9 fluorogenic peptide substrate, OMNIMMP peptide, cleavage by MMP9 catalytic domain expressed and secreted in conditioned media of HEK293T cells wherein the native leader sequence of MMP9 has been replaced by an IgK leader sequence and MMP9 catalytic domain is downstream of 4 repeats of an NFAT response element. FIG. 100D shows graph of MMP9 fluorogenic peptide substrate cleavage by MMP9 catalytic domain expressed and secreted in conditioned media of HEK293T cells wherein the native leader sequence of MMP9 has been replaced by an IgK leader sequence and MMP9 catalytic domain is downstream of 4 repeats of an NFAT response element.

[0435] FIG. 101C shows a graph of an MMP9 peptide substrate cleaved by the expressed MMP9.

[0436] FIGS. 103A-103D show graphs of an MMP9 peptide substrate cleavage assay. FIG. 103A shows the cleavage activity of MMP9 from the lysate of cells transfected with a plasmid having MMP9 expression driven from the NFATc1 promoter or from 4 repeats of an NFAT response element. FIG. 103B shows the cleavage activity of MMP9 from the conditioned media of cells transfected with a plasmid having MMP9 expression driven from the NFATc1 promoter or off of 4 repeats of an NFAT response element.

[0437] FIGS. 104A-104B show the results of the OMNIMMP9 fluorogenic substrate assay that measures activity of MMP9. Conditioned media from human T cells transduced with NFAT-inducible MMP9 alone or in combination with CAR44 were added to the assay and MMP9 substrate cleavage was measured as a function of time. FIG. 104A shows MMP9 activity when human T cells were transduced with both CAR44 and an NFAT-inducible MMP9 after the cells were activated by co-culturing with HCT-MUC1* cancer cells. The trace that does not show increased substrate cleavage as a function of time is the conditioned media from cells that were not activated. FIG. 104B shows MMP9 activity when human T cells were transduced with just an NFAT-inducible MMP9 after the cells were activated by co-culturing with beads coated with anti-CD3 and anti-CD28 which are known to activate T cells. The trace that does not show increased substrate cleavage as a function of time is the conditioned media from cells that were not activated.

### 11. Cloning

### MMP9 Catalytic Domain Cloning in Lentivector Downstream of NFAT Response Elements:

[0438] Two sequences were synthesized (pNFAT-MMP9cat-1 and pNFAT-MMP9cat-2, (SEQ ID NO:784 and SEQ ID NO:785). The lentivector pGreenFire1-4×NFAT (System Biosciences, CA) was digested with SpeI and KpnI restriction enzymes (New England Biolabs). The purified fragment and the 2 synthesized sequences were assembled using the Gibson assembly cloning kit (New England Biolab). The resulting constructs (pGreenFire1-4×NFAT-MMP9cat) contains 4 repeats of a NFAT response element followed by a minimum promoter (mCMV) and the MMP9 catalytic domain with its native leader sequence.

Cloning of NFAT response element in pGL4-14[luc2/Hygro]:

[0439] The 4×NFAT domain was amplified from the lentivector pGreenFire1-4×NFAT by polymerase chain reaction (PCR) using the following primer: 5′-tagatggtaccaagaggaaaatttgtttcatacag-3′ (SEQ ID NO: 786) and 5′-tagataagcttgctggatcggtcccggtgtc-3′ (SEQ ID NO: 787). After digestion with KpnI and HindIII restriction enzymes (New England Biolabs), the purified fragment was cloned into the promoter-less vector pGL4-14[luc2/Hygro] (Promega) digested with the same restriction enzymes to create the construct pGL4-14-4×NFAT.

Cloning of MMP9 Catalytic Domain into pGL4-14-4×NFAT:

[0440] A fragment containing a minimum promoter (mCMV) followed by MMP9 native leader sequence and MMP9 catalytic domain was amplified from the lentivector pGreenFire1-4×NFAT-MMP9cat by polymerase chain reaction (PCR) using the following primer: 5′-tcatacagaaggcgttactagttaggcgtgtacggtgg-3′ (SEQ ID NO:788) and 5′-acagtaccggattgccaagcttttatcacttatcgtcgtcatccttg-3′ (SEQ ID NO:789). pGL4-14-4×NFAT was digested with SpeI and HindIII restriction enzymes (New England Biolabs). The purified PCR fragment and digested pGL4-14-4×NFAT were assembled using the Gibson assembly cloning kit (New England Biolab) to create the construct pGL4-14-4×NFAT-MMP9cat.

Cloning of MMP9 Catalytic Domain into pSECTag2:

[0441] MMP9 catalytic domain without its native leader sequence was amplified from the lentivector pGreenFire1-4×NFAT-MMP9cat by polymerase chain reaction (PCR) using the following primer: 5′-aagttggtaccgttccaaacctttgagggcgacc-3′ (SEQ ID NO:790) and 5′-aagttctcgagcaggttcagggcgaggaccatag-3′ (SEQ ID NO:791). After digestion with KpnI and XhoI restriction enzymes (New England Biolabs), the purified fragment was cloned into the vector pSECTag2 A (ThermoFisher Scientific) digested with the same restriction enzymes to create the construct pSECTag2 MMP9 cat His. In this construct MMP9 catalytic domain will downstream if the IgK leader sequence.

Cloning of MMP9 Catalytic Domain with IgK Leader Sequence into pGL4-14-4×NFAT:

[0442] MMP9 catalytic domain with its native leader sequence was amplified from the pGL4-14-4×NFAT-MMP9cat by polymerase chain reaction (PCR) using the following primer: 5′-attgactcgagctctcgacattcgtttctagagc-3′ (SEQ ID NO:792) and 5′-attgaaagcttttatcacttategtcgtcatccttg-3′ (SEQ ID NO:793). After digestion with XhoI and HindIII restriction enzymes (New England Biolabs), the purified fragment was cloned into the vector pGL4-14[luc2/Hygro] (Promega) digested with the same restriction enzymes to create the construct pGL4-14 MMP9cat XH.

[0443] A fragment containing 4×NFAT response elements followed by the minimum promoter (mCMV) was amplified from pGL4-14-4×NFAT-MMP9cat by polymerase chain reaction (PCR) using the following primer: 5′-tagcaaaataggctgtccc-3′ (SEQ ID NO:794) and 5′-attgactcgaggctggateggtcccggtgtc-3′ (SEQ ID NO:795). After digestion with KpnI and XhoI restriction enzymes (New England Biolabs), the purified fragment was cloned into the vector pGL4-14 MMP9cat XH digested with the same restriction enzymes to create the construct pGL4-14 4×NFAT-MMP9cat KXH

[0444] A fragment containing the IgK leader sequence followed by MMP9 catalytic domain was amplified from pSECTag2 MMP9 cat by polymerase chain reaction (PCR) using the following primer: 5′-aagacaccgggaccgatccagcctcgagagacccaagctggctagccacc-3′ (SEQ ID NO:796) and 5′-ttaccaacagtaccggattgccaagcttttatcacttatcgtcgtcatcc-3′ (SEQ ID NO:797). pGL4-14 4×NFAT-MMP9cat KXH was digested with XhoI and HindIII restriction enzymes (New England Biolabs). The purified PCR fragment and digested pGL4-14 4×NFAT-MMP9cat KXH were assembled using the Gibson assembly cloning kit (New England Biolab) to create the construct pGL4-14-4×NFAT-IgK MMP9cat.

Cloning of MMP9 Catalytic Domain into pEZX-PG02.1 Downstream of NFATc1 Promoter:

[0445] MMP9 catalytic domain with its native leader sequence was amplified from the lentivector pGreenFire1-4×NFAT-MMP9cat by polymerase chain reaction (PCR) using the following primer: 5′-attgaaagcttctctcgacattcgtttctagagc-3′ (SEQ ID NO:798) and 5′-attgagagctcttatcacttatcgtcgtcatc-3′ (SEQ ID NO:799). After digestion with HindIII and SacI restriction enzymes (New England Biolabs), the purified fragment was cloned into the vector pEZX-PG02.1 downstream of the NFACTcl promoter (GeneCopoeia, MD) to create the construct pEZX-NFATc1-MMP9cat.

Modification of pEZX-NFATc1-MMP9cat:

[0446] pEZX-NFATc1-MMP9cat was modified to introduce SpeI and KpnI restriction site 5′ of the NFATc1 promoter and NheI and EcoRV restriction site 3′ of MMP9 catalytic domain. Two gBLOCKs were synthesized by our request by IDT, IA. (NFAT modif 1 and NFAT modif 2, SEQ ID NO:800 and SEQ ID NO:801). The pEZX-NFATc1-MMP9cat vector was digested with NheI, EcoRI, SacI and XhoI restriction enzymes (New England Biolabs). Two fragments were purified and assembled with the two synthesized gBLOCKS using the Gibson assembly cloning kit (New England Biolab).

Cloning of NFATc1 Promoter/MMP9 Catalytic Domain into Lentivector pCDH-CMV-MCS-EF1α-Hygro:

[0447] Modified pEZX-NFATc1-MMP9cat vector was digested with SpeI and NheI restriction enzymes (New England Biolabs) and the fragment containing NFATc1 promoter followed by MMP9 catalytic domain was purified and cloned into the lentivector pCDH-CMV-MCS-EFla-Hygro (System Biosciences) digested with the same restriction enzymes.

Cloning of NFAT Response Element/MMP9 Catalytic Domain into Lentivector pCDH-CMV-MCS-EF1α-Hygro:

[0448] A fragment containing 4 repeats of a NFAT response element followed by MMP9 catalytic domain with its native leader sequence was amplified from the vector pGL4-14-4×NFAT-MMP9cat by polymerase chain reaction (PCR) using the following primer: 5′-acaaaattcaaaattttatcgatactagttggcctaactggccggtaccaag-3′ (SEQ ID NO:802) and 5′-atccgatttaaattcgaattcgctagcttatcacttatcgtcgtcatcc-3′ (SEQ ID NO:803). The purified PCR fragment and digested pCDH-CMV-MCS-EFla-Hygro (SpeI and NheI) were assembled using the Gibson assembly cloning kit (New England Biolab).

[0449] All of the references cited herein are incorporated by reference in their entirety.

### Sequence Listing Free Text

[0450] As regards the use of nucleotide symbols other than a, g, c, t, they follow the convention set forth in WIPO Standard ST. 25, Appendix 2, Table 1, wherein k represents t or g; n represents a, c, t or g; m represents a or c; r represents a or g; s represents c or g; w represents a or t and y represents c or t.

MUC1 Receptor
(Mucin 1 precursor, Genbank Accession number: P15941)
(SEQ ID NO: 1)
MTPGTQSPFFLLLLLTVLTVVTGSGHASSTPGGEKETSATQRSSVPSSTEKNAVSMTSSVLSSHSPGSGSSTTQGQDVTLA
PATEPASGSAATWGQDVTSVPVTRPALGSTTPPAHDVTSAPDNKPAPGSTAPPAHGVTSAPDTRPAPGSTAPPAHGVTSAP
DTRPAPGSTAPPAHGVTSAPDTRPAPGSTAPPAHGVTSAPDTRPAPGSTAPPAHGVTSAPDTRPAPGSTAPPAHGVTSAPD
TRPAPGSTAPPAHGVTSAPDTRPAPGSTAPPAHGVTSAPDTRPAPGSTAPPAHGVTSAPDTRPAPGSTAPPAHGVTSAPDT
RPAPGSTAPPAHGVTSAPDTRPAPGSTAPPAHGVTSAPDTRPAPGSTAPPAHGVTSAPDTRPAPGSTAPPAHGVTSAPDTR
PAPGSTAPPAHGVTSAPDTRPAPGSTAPPAHGVTSAPDTRPAPGSTAPPAHGVTSAPDTRPAPGSTAPPAHGVTSAPDTRP
APGSTAPPAHGVTSAPDTRPAPGSTAPPAHGVTSAPDTRPAPGSTAPPAHGVTSAPDTRPAPGSTAPPAHGVTSAPDTRPA
PGSTAPPAHGVTSAPDTRPAPGSTAPPAHGVTSAPDTRPAPGSTAPPAHGVTSAPDTRPAPGSTAPPAHGVTSAPDTRPAP
GSTAPPAHGVTSAPDTRPAPGSTAPPAHGVTSAPDTRPAPGSTAPPAHGVTSAPDTRPAPGSTAPPAHGVTSAPDTRPAPG
STAPPAHGVTSAPDTRPAPGSTAPPAHGVTSAPDTRPAPGSTAPPAHGVTSAPDTRPAPGSTAPPAHGVTSAPDTRPAPGS
TAPPAHGVTSAPDTRPAPGSTAPPAHGVTSAPDTRPAPGSTAPPAHGVTSAPDTRPAPGSTAPPAHGVTSAPDTRPAPGST
APPAHGVTSAPDTRPAPGSTAPPAHGVTSAPDTRPAPGSTAPPAHGVTSAPDNRPALGSTAPPVHNVTSASGSASGSASTL
VHNGTSARATTTPASKSTPFSIPSHHSDTPTTLASHSTKTDASSTHHSSVPPLTSSNHSTSPQLSTGVSFFFLSFHISNLQ
FNSSLEDPSTDYYQELQRDISEMFLQIYKQGGFLGLSNIKFRPGSVVVQLTLAFREGTINVHDVETQFNQYKTEAASRYNL
TISDVSVSDVPFPFSAQSGAGVPGWGIALLVLVCVLVALAIVYLIALAVCQCRRKNYGQLDIFPARDTYHPMSEYPTYHTH
GRYVPPSSTDRSPYEKVSAGNGGSSLSYTNPAVAAASANL
PSMGFR
(SEQ ID NO: 2)
GTINVHDVETQFNQYKTEAASRYNLTISDVSVSDVPFPFSAQSGA
Human NME1
(DNA)
(SEQ ID NO: 3)
atggccaactgtgagcgtaccttcattgcgatcaaaccagatggggtccagcggggtcttgtgggagagattatcaagcg
ttttgagcagaaaggattccgccttgttggtctgaaattcatgcaagcttccgaagatcttctcaaggaacactacgttg
acctgaaggaccgtccattctttgccggcctggtgaaatacatgcactcagggccggtagttgccatggtctgggagggg
ctgaatgtggtgaagacgggccgagtcatgctcggggagaccaaccctgcagactccaagcctgggaccatccgtggaga
cttctgcatacaagttggcaggaacattatacatggcagtgattctgtggagagtgcagagaaggagatcggcttgtggt
ttcaccctgaggaactggtagattacacgagctgtgctcagaactggatctatgaatga
(amino acids)
(SEQ ID NO: 4)
MANCERTFIAIKPDGVQRGLVGEIIKRFEQKGFRLVGLKFMQASEDLLKEHYVDLKDRPFFAGLVKYMHSGPVVAMVWEG
LNVVKTGRVMLGETNPADSKPGTIRGDFCIQVGRNIIHGSDSVESAEKEIGLWFHPEELVDYTSCAQNWIYE-
Human NME7
(DNA)
(SEQ ID NO: 5)
atgaatcatagtgaaagattcgttttcattgcagagtggtatgatccaaatgcttcacttcttcgacgttatgagctttt
attttacccaggggatggatctgttgaaatgcatgatgtaaagaatcatcgcacctttttaaagcggaccaaatatgata
acctgcacttggaagatttatttataggcaacaaagtgaatgtcttttctcgacaactggtattaattgactatggggat
caatatacagctcgccagctgggcagtaggaaagaaaaaacgctagccctaattaaaccagatgcaatatcaaaggctgg
agaaataattgaaataataaacaaagctggatttactataaccaaactcaaaatgatgatgctttcaaggaaagaagcat
tggattttcatgtagatcaccagtcaagaccctttttcaatgagctgatccagtttattacaactggtcctattattgcc
atggagattttaagagatgatgctatatgtgaatggaaaagactgctgggacctgcaaactctggagtggcacgcacaga
tgcttctgaaagcattagagccctctttggaacagatggcataagaaatgcagcgcatggccctgattcttttgcttctg
cggccagagaaatggagttgttttttccttcaagtggaggttgtgggccggcaaacactgctaaatttactaattgtacc
tgttgcattgttaaaccccatgctgtcagtgaaggactgttgggaaagatcctgatggctatccgagatgcaggttttga
aatctcagctatgcagatgttcaatatggatcgggttaatgttgaggaattctatgaagtttataaaggagtagtgaccg
aatatcatgacatggtgacagaaatgtattctggcccttgtgtagcaatggagattcaacagaataatgctacaaagaca
tttcgagaattttgtggacctgctgatcctgaaattgcccggcatttacgccctggaactctcagagcaatctttggtaa
aactaagatccagaatgctgttcactgtactgatctgccagaggatggcctattagaggttcaatacttcttcaagatct
tggataattag
(amino acids)
(SEQ ID NO: 6)
MNHSERFVFIAEWYDPNASLLRRYELLFYPGDGSVEMHDVKNHRTFLKRTKYDNLHLEDLFIGNKVNVFSRQLVLIDYGD
QYTARQLGSRKEKTLALIKPDAISKAGEIIEIINKAGFTITKLKMMMLSRKEALDFHVDHQSRPFFNELIQFITTGPIIA
MEILRDDAICEWKRLLGPANSGVARTDASESIRALFGTDGIRNAAHGPDSFASAAREMELFFPSSGGCGPANTAKFTNCT
CCIVKPHAVSEGLLGKILMAIRDAGFEISAMQMENMDRVNVEEFYEVYKGVVTEYHDMVTEMYSGPCVAMEIQQNNATKT
FREFCGPADPEIARHLRPGTLRAIFGKTKIQNAVHCTDLPEDGLLEVQYFFKILDN-
NME7 peptides
NME7A peptide 1 (A domain):
(SEQ ID NO: 7)
MLSRKEALDFHVDHQS
NME7A peptide 2 (A domain):
(SEQ ID NO: 8)
SGVARTDASES
NME7B peptide 1 (B domain):
(SEQ ID NO: 9)
DAGFEISAMQMENMDRVNVE
NME7B peptide 2 (B domain):
(SEQ ID NO: 10)
EVYKGVVTEYHDMVTE
NME7B peptide 3 (B domain):
(SEQ ID NO: 11)
AIFGKTKIQNAVHCTDLPEDGLLEVOYFF
Mouse E6 Heavy chain variable region sequence:
(DNA)
(SEQ ID NO: 12)
gaggtgaaggtggtggagtctgggggagacttagtgaagcctggagggtccctgaaactctcctgtgtagtctctggattc
actttcagtagatatggcatgtcttgggttcgccagactccaggcaagaggctggagtgggtcgcaaccattagtggtggc
ggtacttacatctactatccagacagtgtgaaggggcgattcaccatctccagagacaatgccaagaacaccctgtacctg
caaatgagcagtctgaagtctgaggacacagccatgtatcactgtacaagggataactacggtaggaactacgactacggt
atggactactggggtcaaggaacctcagtcaccgtctcctca
(amino acids)
(SEQ ID NO: 13)
EVKVVESGGDLVKPGGSLKLSCVVSGFTFSRYGMSWVRQTPGKRLEWVATISGGGTYIYYPDSVKGRFTISRDNAKNTLYL
QMSSLKSEDTAMYHCTRDNYGRNYDYGMDYWGQGTSVTVSS
Mouse E6 heavy chain variable framework region 1 (FWR1) sequence:
(DNA)
(SEQ ID NO: 14)
gaggtgaaggtggtggagtctgggggagacttagtgaagcctggagggtccctgaaactctcctgtgtagtctct
(amino acids)
(SEQ ID NO: 15)
EVKVVESGGDLVKPGGSLKLSCVVSGFTFS
Mouse E6 heavy chain variable complementarity determining regions 1 (CDR1)
sequence:
(DNA)
(SEQ ID NO: 16)
ggattcactttcagtagatatggcatgtct
(amino acids)
(SEQ ID NO: 17)
RYGMS
Mouse E6 heavy chain variable framework region 2 (FWR2) sequence:
(DNA)
(SEQ ID NO: 18)
tgggttcgccagactccaggcaagaggctggagtgggtcgca
(amino acids)
(SEQ ID NO: 19)
WVRQTPGKRLEWVA
Mouse E6 heavy chain variable complementarity determining regions 2 (CDR2)
sequence:
(SEQ ID NO: 20)
accattagtggtggcggtacttacatctactatccagacagtgtgaagggg
(amino acids)
(SEQ ID NO: 21)
TISGGGTYIYYPDSVKG
Mouse E6 heavy chain variable framework region 3 (FWR3) acid sequence:
(SEQ ID NO: 22)
cgattcaccatctccagagacaatgccaagaacaccctgtacctgcaaatgagcagtctgaagtctgaggacacagccat
gtatcactgtacaagg
(SEQ ID NO: 23)
(amino acids)
RFTISRDNAKNTLYLQMSSLKSEDTAMYHCTR
Mouse E6 heavy
(SEQ ID NO: 24)
chain variable complementarity determining regions 3 (CDR3)
sequence:
gataactacggtaggaactacgactacggtatggactac
(amino acids)
(SEQ ID NO: 25)
DNYGRNYDYGMDY
IGHV3-21*03 heavy chain variable region sequence:
(SEQ ID NO: 26)
gaggtgcagctggtggagtctgggggaggcctggtcaagcctggggggtccctgagactctcctgtgcagcctctggatt
caccttcagtagctatagcatgaactgggtccgccaggctccagggaaggggctggagtgggtctcatccattagtagta
gtagtagttacatatactacgcagactcagtgaagggccgattcaccatctccagagacaacgccaagaactcactgtat
ctgcaaatgaacagcctgagagccgaggacacggctgtgtattactgtgcgaga
(amino acids)
(SEQ ID NO: 27)
EVQLVESGGGLVKPGGSLRLSCAASGFTFSSYSMNWVRQAPGKGLEWVSSISSSSSYIYYADSVKGRFTISRDNAKNSLY
LQMNSLRAEDTAVYYCAR
IGHV3-21*01 heavy chain variable framework region 1 (FWR1) sequence:
(SEQ ID NO: 28)
gaggtgcagctggtggagtctgggggaggcctggtcaagcctggggggtccctgagactctcctgtgcagcctctggatt
caccttcagt
(amino acids)
(SEQ ID NO: 29)
EVQLVESGGGLVKPGGSLRLSCAASGFTFS
IGHV3-21*01 heavy chain variable complementarity determining regions 1 (CDR1)
sequence:
(SEQ ID NO: 30)
agctatagcatgaac
(amino acids)
(SEQ ID NO: 31)
SYSMN
IGHV3-21*01 heavy chain variable framework region 2 (FWR2) sequence:
(DNA)
(SEQ ID NO: 32)
tgggtccgccaggctccagggaaggggctggagtgggtctca
(amino acids)
(SEQ ID NO: 33)
WVRQAPGKGLEWVS
IGHV3-21*01 heavy chain variable complementarity determining regions 2 (CDR2)
sequence:
(DNA)
(SEQ ID NO: 34)
tccattagtagtagtagtagttacatatactacgcagactcagtgaagggc
(amino acids)
(SEQ ID NO: 35)
SISSSSSYIYYADSVKG
IGHV3-21*01 heavy chain variable framework region 3 (FWR3) sequence:
(DNA)
(SEQ ID NO: 36)
cgattcaccatctccagagacaacgccaagaactcactgtatctgcaaatgaacagcctgagagccgaggacacggctgt
gtattactgtgcgaga
(amino acids)
(SEQ ID NO: 37)
RFTISRDNAKNSLYLQMNSLRAEDTAVYYCAR
Humanized E6 heavy chain variable region sequence:
(DNA)
(SEQ ID NO: 38)
gaggtgcagctggtggagtctgggggaggcctggtcaagcctggggggtccctgagactctcctgtgcagcctctggatt
caccttcagtaggtatggcatgagctgggtccgccaggctccagggaagaggctggagtgggtctcaaccattagtggcg
gaggcacctacatatactacccagactcagtgaagggccgattcaccatctccagagacaacgccaagaacaccctgtat
ctgcaaatgaacagcctgagagccgaggacacggctgtgtattactgtaccagagataactatggccgcaactatgatta
tggcatggattattggggccagggcaccctggtgaccgtgagcagc
(amino acids)
(SEQ ID NO: 39)
EVQLVESGGGLVKPGGSLRLSCAASGFTFSRYGMSWVRQAPGKRLEWVSTISGGGTYIYYPDSVKGRFTISRDNAKNTLY
LQMNSLRAEDTAVYYCTRDNYGRNYDYGMDYWGQGTLVTVSS
Humanized E6 heavy chain variable framework region 1 (FWR1) acid sequence:
(DNA)
(SEQ ID NO: 40)
gaggtgcagctggtggagtctgggggaggcctggtcaagcctggggggtccctgagactctcctgtgcagcctctggatt
caccttcagt
(amino acids)
(SEQ ID NO: 41)
EVQLVESGGGLVKPGGSLRLSCAASGFTFS
Humanized E6 heavy chain variable complementarity determining regions 1 (CDR1)
sequence:
(DNA)
(SEQ ID NO: 42)
aggtatggcatgagc
(amino acids)
(SEQ ID NO: 43)
RYGMS
Humanized E6 heavy chain variable framework region 2 (FWR2) acid sequence:
(DNA)
(SEQ ID NO: 44)
tgggtccgccaggctccagggaagaggctggagtgggtctca
(amino acids)
(SEQ ID NO: 45)
WVRQAPGKRLEWVS
Humanized E6 heavy chain variable complementarity determining regions 2 (CDR2)
sequence:
(DNA)
(SEQ ID NO: 46)
accattagtggcggaggcacctacatatactacccagactcagtgaagggc
(amino acids)
(SEQ ID NO: 47)
TISGGGTYIYYPDSVKG
Humanized E6 heavy chain variable framework region 3 (FWR3) acid sequence:
(DNA)
(SEQ ID NO: 48)
cgattcaccatctccagagacaacgccaagaacaccctgtatctgcaaatgaacagcctgagagccgaggacacggctgtg
tattactgtaccaga
(amino acids)
(SEQ ID NO: 49)
RFTISRDNAKNTLYLQMNSLRAEDTAVYYCTR
Humanized E6 heavy chain variable complementarity determining regions 3 (CDR3)
sequence:
(DNA)
(SEQ ID NO: 50)
gataactatggccgcaactatgattatggcatggattat
(amino acids)
(SEQ ID NO: 51)
DNYGRNYDYGMDY
Humanized E6 IgG2 heavy chain synthesized by Genescript:
(DNA)
(SEQ ID NO: 52)
gaattctaagcttgggccaccatggaactggggctccgctgggttttccttgttgctattttagaaggtgtccagtgtgag
gtgcagctggtggagtctgggggaggcctggtcaagcctggggggtccctgagactctcctgtgcagcctctggattcacc
ttcagtaggtatggcatgagctgggtccgccaggctccagggaagaggctggagtgggtctcaaccattagtggcggaggc
acctacatatactacccagactcagtgaagggccgattcaccatctccagagacaacgccaagaacaccctgtatctgcaa
atgaacagcctgagagccgaggacacggctgtgtattactgtaccagagataactatggccgcaactatgattatggcatg
gattattggggccagggcaccctggtgaccgtgagcagcgcctccaccaagggcccatcggtcttccccctggcgccctgc
tccaggagcacctccgagagcacagccgccctgggctgcctggtcaaggactacttccccgaaccggtgacggtgtcgtgg
aactcaggcgctctgaccagcggcgtgcacaccttcccagctgtcctacagtcctcaggactctactccctcagcagcgtg
gtgaccgtgccctccagcaacttcggcacccagacctacacctgcaacgtagatcacaagcccagcaacaccaaggtggac
aagacagttgagcgcaaatgttgtgtcgagtgcccaccgtgcccagcaccacctgtggcaggaccgtcagtcttcctcttc
cccccaaaacccaaggacaccctcatgatctcccggacccctgaggtcacgtgcgtggtggtggacgtgagccacgaagac
cccgaggtccagttcaactggtacgtggacggcgtggaggtgcataatgccaagacaaagccacgggaggagcagttcaac
agcacgttccgtgtggtcagcgtcctcaccgttgtgcaccaggactggctgaacggcaaggagtacaagtgcaaggtctcc
aacaaaggcctcccagcccccatcgagaaaaccatctccaaaaccaaagggcagccccgagaaccacaggtgtacaccctg
cccccatcccgggaggagatgaccaagaaccaggtcagcctgacctgcctggtcaaaggcttctaccccagcgacatcgcc
gtggagtgggagagcaatgggcagccggagaacaactacaagaccacacctcccatgctggactccgacggctccttcttc
ctctacagcaagctcaccgtggacaagagcaggtggcagcaggggaacgtcttctcatgctccgtgatgcatgaggctctg
cacaaccactacacgcagaagagcctctccctgtctccgggtaaatagtaagtttaaactctaga
(amino acids)
(SEQ ID NO: 53)
EF*AWATMELGLRWVFLVAILEGVQCEVQLVESGGGLVKPGGSLRLSCAASGFTFSRYGMSWVRQAPGKRLEWVSTISGGG
TYIYYPDSVKGRFTISRDNAKNTLYLQMNSLRAEDTAVYYCTRDNYGRNYDYGMDYWGQGTLVTVSSASTKGPSVFPLAPC
SRSTSESTAALGCLVKDYFPEPVTVSWNSGALTSGVHTFPAVLQSSGLYSLSSVVTVPSSNFGTQTYTCNVDHKPSNTKVD
KTVERKCCVECPPCPAPPVAGPSVFLFPPKPKDTLMISRTPEVTCVVVDVSHEDPEVQFNWYVDGVEVHNAKTKPREEQEN
STFRVVSVLTVVHQDWLNGKEYKCKVSNKGLPAPIEKTISKTKGQPREPQVYTLPPSREEMTKNQVSLTCLVKGFYPSDIA
VEWESNGQPENNYKTTPPMLDSDGSFFLYSKLTVDKSRWQQGNVFSCSVMHEALHNHYTQKSLSLSPGK**V*TLX
Human IgG2 heavy chain constant region sequence:
(DNA)
(SEQ ID NO: 54)
gcctccaccaagggcccatcggtcttccccctggcgccctgctccaggagcacctccgagagcacagccgccctgggctgc
ctggtcaaggactacttccccgaaccggtgacggtgtcgtggaactcaggcgctctgaccagcggcgtgcacaccttccca
gctgtcctacagtcctcaggactctactccctcagcagcgtggtgaccgtgccctccagcaacttcggcacccagacctac
acctgcaacgtagatcacaagcccagcaacaccaaggtggacaagacagttgagcgcaaatgttgtgtcgagtgcccaccg
tgcccagcaccacctgtggcaggaccgtcagtcttcctcttccccccaaaacccaaggacaccctcatgatctcccggacc
cctgaggtcacgtgcgtggtggtggacgtgagccacgaagaccccgaggtccagttcaactggtacgtggacggcgtggag
gtgcataatgccaagacaaagccacgggaggagcagttcaacagcacgttccgtgtggtcagcgtcctcaccgttgtgcac
caggactggctgaacggcaaggagtacaagtgcaaggtctccaacaaaggcctcccagcccccatcgagaaaaccatctcc
aaaaccaaagggcagccccgagaaccacaggtgtacaccctgcccccatcccgggaggagatgaccaagaaccaggtcagc
ctgacctgcctggtcaaaggcttctaccccagcgacatcgccgtggagtgggagagcaatgggcagccggagaacaactac
aagaccacacctcccatgctggactccgacggctccttcttcctctacagcaagctcaccgtggacaagagcaggtggcag
caggggaacgtcttctcatgctccgtgatgcatgaggctctgcacaaccactacacgcagaagagcctctccctgtctccg
ggtaaatag
(amino acids)
(SEQ ID NO: 55)
ASTKGPSVFPLAPCSRSTSESTAALGCLVKDYFPEPVTVSWNSGALTSGVHTFPAVLQSSGLYSLSSVVTVPSSNFGTQTY
TCNVDHKPSNTKVDKTVERKCCVECPPCPAPPVAGPSVFLFPPKPKDTLMISRTPEVTCVVVDVSHEDPEVQFNWYVDGVE
VHNAKTKPREEQFNSTFRVVSVLTVVHQDWLNGKEYKCKVSNKGLPAPIEKTISKTKGQPREPQVYTLPPSREEMTKNQVS
LTCLVKGFYPSDIAVEWESNGQPENNYKTTPPMLDSDGSFFLYSKLTVDKSRWQQGNVFSCSVMHEALHNHYTQKSLSLSP
GK
Humanized E6 IgG1 heavy chain sequence:
(DNA)
(SEQ ID NO: 56)
gaggtgcagctggtggagtctgggggaggcctggtcaagcctggggggtccctgagactctcctgtgcagcctctggattc
accttcagtaggtatggcatgagctgggtccgccaggctccagggaagaggctggagtgggtctcaaccattagtggcgga
ggcacctacatatactacccagactcagtgaagggccgattcaccatctccagagacaacgccaagaacccactgtatctg
caaatgaacagcctgagagccgaggacacggctgtgtattactgtcccagagataactatggccgcaactatgattatggc
atggattattggggccagggcaccctggtgaccgtgagcagcgctagcaccaagggcccatcggtcttccccctggcaccc
tcctccaagagcacctctgggggcacagcggccctgggctgcctggtcaaggactacttccccgaaccggtgacggtgtcg
tggaactcaggcgccctgaccagcggcgtgcacaccttcccggctgtcctacagtcctcaggactctactccctcagcagc
gtggtgacagtgccctccagcagcttgggcacccagacctacatctgcaacgtgaatcacaagcccagcaacaccaaggtg
gacaagaaagttgagcccaaatcttgtgacaaaactcacacatgcccaccgtgcccagcacctgaactcctggggggaccg
tcagtcttcctcttccccccaaaacccaaggacaccctcatgatctcccggacccctgaggtcacatgcgtggtggtggac
gtgagccacgaagaccctgaggtcaagttcaactggtacgtggacggcgtggaggtgcataatgccaagacaaagccgcgg
gaggagcagtacaacagcacgtaccgtgtggtcagcgtcctcaccgtcctgcaccaggactggctgaatggcaaggagtac
aagtgcaaggtctccaacaaagccctcccagcccccatcgagaaaaccatctccaaagccaaagggcagccccgagaacca
caggtgtacaccctgcccccatcccgggaggagatgaccaagaaccaggtcagcctgacctgcctggtcaaaggcttctat
cccagcgacatcgccgtggagtgggagagcaatgggcagccggagaacaactacaagaccacgcctcccgtgctggactcc
gacggctccttcttcctctacagcaagctcaccgtggacaagagcaggtggcagcaggggaacgtcttctcatgctccgtg
atgcatgaggctctgcacaaccactacacgcagaagagcctctccctgtctccgggtaaatgataa
(amino acids)
(SEQ ID NO: 57)
EVQLVESGGGLVKPGGSLRLSCAASGFTFSRYGMSWVRQAPGKRLEWVSTISGGGTYIYYPDSVKGRFTISRDNAKNPLYL
QMNSLRAEDTAVYYCPRDNYGRNYDYGMDYWGQGTLVTVSSASTKGPSVFPLAPSSKSTSGGTAALGCLVKDYFPEPVTVS
WNSGALTSGVHTFPAVLQSSGLYSLSSVVTVPSSSLGTQTYICNVNHKPSNTKVDKKVEPKSCDKTHTCPPCPAPELLGGP
SVFLFPPKPKDTLMISRTPEVTCVVVDVSHEDPEVKFNWYVDGVEVHNAKTKPREEQYNSTYRVVSVLTVLHQDWLNGKEY
KCKVSNKALPAPIEKTISKAKGQPREPQVYTLPPSREEMTKNQVSLTCLVKGFYPSDIAVEWESNGQPENNYKTTPPVLDS
DGSFFLYSKLTVDKSRWQQGNVFSCSVMHEALHNHYTQKSLSLSPGK**
Human IgG1 heavy chain constant region sequence:
(DNA)
(SEQ ID NO: 58)
gctagcaccaagggcccatcggtcttccccctggcaccctcctccaagagcacctctgggggcacagcggccctgggctgc
ctggtcaaggactacttccccgaaccggtgacggtgtcgtggaactcaggcgccctgaccagcggcgtgcacaccttcccg
gctgtcctacagtcctcaggactctactccctcagcagcgtggtgacagtgccctccagcagcttgggcacccagacctac
atctgcaacgtgaatcacaagcccagcaacaccaaggtggacaagaaagttgagcccaaatcttgtgacaaaactcacaca
tgcccaccgtgcccagcacctgaactcctggggggaccgtcagtcttcctcttccccccaaaacccaaggacaccctcatg
atctcccggacccctgaggtcacatgcgtggtggtggacgtgagccacgaagaccctgaggtcaagttcaactggtacgtg
gacggcgtggaggtgcataatgccaagacaaagccgcgggaggagcagtacaacagcacgtaccgtgtggtcagcgtcctc
accgtcctgcaccaggactggctgaatggcaaggagtacaagtgcaaggtctccaacaaagccctcccagcccccatcgag
aaaaccatctccaaagccaaagggcagccccgagaaccacaggtgtacaccctgcccccatcccgggaggagatgaccaag
aaccaggtcagcctgacctgcctggtcaaaggcttctatcccagcgacatcgccgtggagtgggagagcaatgggcagccg
gagaacaactacaagaccacgcctcccgtgctggactccgacggctccttcttcctctacagcaagctcaccgtggacaag
agcaggtggcagcaggggaacgtcttctcatgctccgtgatgcatgaggctctgcacaaccactacacgcagaagagcctc
tccctgtctccgggtaaatgataa
(amino acids)
(SEQ ID NO: 59)
ASTKGPSVFPLAPSSKSTSGGTAALGCLVKDYFPEPVTVSWNSGALTSGVHTFPAVLQSSGLYSLSSVVTVPSSSLGTQTY
ICNVNHKPSNTKVDKKVEPKSCDKTHTCPPCPAPELLGGPSVFLFPPKPKDTLMISRTPEVTCVVVDVSHEDPEVKENWYV
DGVEVHNAKTKPREEQYNSTYRVVSVLTVLHQDWLNGKEYKCKVSNKALPAPIEKTISKAKGQPREPQVYTLPPSREEMTK
NQVSLTCLVKGFYPSDIAVEWESNGQPENNYKTTPPVLDSDGSFFLYSKLTVDKSRWQQGNVFSCSVMHEALHNHYTQKSL
SLSPGK**
Human IgG1 heavy chain constant region gBLOCK#1 sequence:
(DNA)
(SEQ ID NO: 60)
atggcatggattattggggccagggcaccctggtgaccgtgagcagcgctagcaccaagggcccatcggtcttccccctgg
caccctcctccaagagcacctctgggggcacagcggccctgggctgcctggtcaaggactacttccccgaaccggtgacgg
tgtcgtggaactcaggcgccctgaccagcggcgtgcacaccttcccggctgtcctacagtcctcaggactctactccctca
gcagcgtggtgacagtgccctccagcagcttgggcacccagacctacatctgcaacgtgaatcacaagcccagcaacacca
aggtggacaagaaagttgagcccaaatcttgtgacaaaactcacacatgcccaccgtgcccagcacctgaactcctggggg
gaccgtcagtcttcctcttccccccaaaacccaaggacaccctcatgatctcccggacccctgaggtcacatgcgtggtgg
tggacgtgagccacgaagaccctgaggtcaagttcaactggtacgtggacggcgtggaggtgcataatgccaag
Human IgG1 heavy chain constant region gBLOCK#2 sequence:
(DNA)
(SEQ ID NO: 61)
tacgtggacggcgtggaggtgcataatgccaagacaaagccgcgggaggagcagtacaacagcacgtaccgtgtggtcagc
gtcctcaccgtcctgcaccaggactggctgaatggcaaggagtacaagtgcaaggtctccaacaaagccctcccagccccc
atcgagaaaaccatctccaaagccaaagggcagccccgagaaccacaggtgtacaccctgcccccatcccgggaggagatg
accaagaaccaggtcagcctgacctgcctggtcaaaggcttctatcccagcgacatcgccgtggagtgggagagcaatggg
cagccggagaacaactacaagaccacgcctcccgtgctggactccgacggctccttcttcctctacagcaagctcaccgtg
gacaagagcaggtggcagcaggggaacgtcttctcatgctccgtgatgcatgaggctctgcacaaccactacacgcagaag
agcctctccctgtctccgggtaaatgataagtttaaacccgctgatcagcctcgactgtgccttctagttg
E6 heavy chain variable region overlapping sequence:
(DNA)
(SEQ ID NO: 62)
atggcatggattattggggccagggcaccct
IgG1 heavy chain constant region overlapping region sequence:
(DNA)
(SEQ ID NO: 63)
tacgtggacggcgtggaggtgcataatgccaag
pCDNA3.1 V5 and pSECTag2 overlapping sequence:
(DNA)
(SEQ ID NO: 64)
ccgctgatcagcctcgactgtgccttctagttg
Mouse E6 Light Chain variable region sequence:
(DNA)
(SEQ ID NO: 65)
caaattgttctcacccagtctccagcaatcatgtctgcatctccaggggaggaggtcaccctaacctgcagtgccacctca
agtgtaagttacatacactggttccagcagaggccaggcacttctcccaaactctggatttatagcacatccaacctggct
tctggagtccctgttcgcttcagtggcagtggatatgggacctcttactctctcacaatcagccgaatggaggctgaagat
gctgccacttattactgccagcaaaggagtagttccccattcacgttcggctcggggacaaagttggaaataaaa
(amino acids)
(SEQ ID NO: 66)
QIVLTQSPAIMSASPGEEVTLTCSATSSVSYIHWFQQRPGTSPKLWIYSTSNLASGVPVRFSGSGYGTSYSLTISRMEAED
AATYYCQQRSSSPFTFGSGTKLEIK
Mouse E6 light chain variable framework region 1 (FWR1) sequence:
(DNA)
(SEQ ID NO: 67)
caaattgttctcacccagtctccagcaatcatgtctgcatctccaggggaggaggtcaccctaacctgc
(amino acids)
(SEQ ID NO: 68)
QIVLTQSPAIMSASPGEEVTLTC
Mouse E6 light chain variable complementarity determining regions 1 (CDR1)
sequence:
(DNA)
(SEQ ID NO: 69)
AGTGCCACCTCAAGTGTAAGTTACATACAC
(amino acids)
(SEQ ID NO: 70)
SATSSVSYIH
Mouse E6 light chain variable framework region 2 (FWR2) sequence:
(DNA)
(SEQ ID NO: 71)
tggttccagcagaggccaggcacttctcccaaactctggatttat
(amino acids)
(SEQ ID NO: 72)
WFQQRPGTSPKLWIY
Mouse E6 light chain variable complementarity determining regions 2 (CDR2)
sequence:
(DNA)
(SEQ ID NO: 73)
agcacatccaacctggcttct
(amino acids)
(SEQ ID NO: 74)
STSNLAS
Mouse E6 light chain variable framework region 3 (FWR3) sequence:
(DNA)
(SEQ ID NO: 75)
ggagtccctgttcgcttcagtggcagtggatatgggacctcttactctctcacaatcagccgaatggaggctgaagatgc
tgccacttattactgc
(amino acids)
(SEQ ID NO: 76)
GVPVRFSGSGYGTSYSLTISRMEAEDAATYYC
Mouse E6 light chain variable complementarity determining regions 3 (CDR3)
sequence:
(DNA)
(SEQ ID NO: 77)
cagcaaaggagtagttccccattcacg
(amino acids)
(SEQ ID NO: 78)
QQRSSSPFT
IGKV3-11*02 light chain variable region sequence:
(DNA)
(SEQ ID NO: 79)
gaaattgtgttgacacagtctccagccaccctgtctttgtctccaggggaaagagccaccctctcctgcagggccagtca
gagtgttagcagctacttagcctggtaccaacagaaacctggccaggctcccaggctcctcatctatgatgcatccaaca
gggccactggcatcccagccaggttcagtggcagtgggtctgggagagacttcactctcaccatcagcagcctagagcct
gaagattttgcagtttattactgtcagcagcgtagcaactggcctcc
(amino acids)
(SEQ ID NO: 80)
EIVLTQSPATLSLSPGERATLSCRASQSVSSYLAWYQQKPGQAPRLLIYDASNRATGIPA
RFSGSGSGRDFTLTISSLEPEDFAVYYCQQRSNWPP
IGKV3-11*02 light chain variable framework region 1 (FWR1) acid sequence:
(DNA)
(SEQ ID NO: 81)
gaaattgtgttgacacagtctccagccaccctgtctttgtctccaggggaaagagccaccctctcctgc
(amino acids)
(SEQ ID NO: 82)
EIVLTQSPATLSLSPGERATLSC
IGKV3-11*02 light chain variable complementarity determining regions 1 (CDR1)
sequence:
(DNA)
(SEQ ID NO: 83)
agggccagtcagagtgttagcagctacttagcc
(amino acids)
(SEQ ID NO: 84)
RASQSVSSYLA
IGKV3-11*02 light chain variable framework region 2 (FWR2) sequence:
(DNA)
(SEQ ID NO: 85)
tggtaccaacagaaacctggccaggctcccaggctcctcatctat
(amino acids)
(SEQ ID NO 86)
WYQQKPGQAPRLLIY
IGKV3-11*02 light chain variable complementarity determining regions 2 (CDR2)
sequence:
(DNA)
(SEQ ID NO: 87)
gatgcatccaacagggccact
(amino acids)
(SEQ ID NO: 88)
DASNRAT
IGKV3-11*02 light chain variable framework region 3 (FWR3) sequence:
(DNA)
(SEQ ID NO: 89)
ggcatcccagccaggttcagtggcagtgggtctgggagagacttcactctcaccatcagcagcctagagcctgaagattt
tgcagtttattactgt
(amino acids)
(SEQ ID NO: 90)
GIPARFSGSGSGTDFTLTISSLEPEDFAVYYC
IGKV3-11*02 light chain variable complementarity determining regions3 (CDR3)
sequence:
(DNA)
(SEQ ID NO: 91)
cagcagcgtagcaactggcctcc
(amino acids)
(SEQ ID NO: 92)
QQRSNWPP
Humanized E6 light chain variable region sequence:
(DNA)
(SEQ ID NO: 93)
gaaattgtgttgacacagtctccagccaccctgtctttgtctccaggggaaagagccaccctcacctgcagcgccaccagc
agtgttagctacatccactggtaccaacagaggcctggccagagccccaggctcctcatctatagcacctccaacctggcc
agcggcatcccagccaggttcagtggcagtgggtctgggagcgactacactctcaccatcagcagcctagagcctgaagat
tttgcagtttattactgtcagcagcgtagcagctcccctttcacctttggcagcggcaccaaagtggaaattaaa
(amino acids)
(SEQ ID NO: 94)
EIVLTQSPATLSLSPGERATLTCSATSSVSYIHWYQQRPGQSPRLLIYSTSNLASGIPARFSGSGSGSDYTLTISSLEPED
FAVYYCQQRSSSPFTFGSGTKVEIK
Humanized E6 light chain variable framework region 1 (FWR1) acid sequence:
(DNA)
(SEQ ID NO: 95)
gaaattgtgttgacacagtctccagccaccctgtctttgtctccaggggaaagagccaccctcacctgc
(amino acids)
(SEQ ID NO: 96)
EIVLTQSPATLSLSPGERATLTC
Humanized E6 light chain variable complementarity determining regions 1 (CDR1)
sequence:
(DNA)
(SEQ ID NO: 97)
agcgccaccagcagtgttagctacatccac
(amino acids)
(SEQ ID NO: 98)
SATSSVSYIH
Humanized E6 heavy light variable framework region 2 (FWR2) acid sequence:
(DNA)
(SEQ ID NO: 99)
tggtaccaacagaggcctggccagagccccaggctcctcatctat
(amino acids)
(SEQ ID NO: 100)
WYQQRPGQSPRLLIY
Humanized E6 light chain variable complementarity determining regions 2 (CDR2)
sequence:
(DNA)
(SEQ ID NO: 101)
agcacctccaacctggccagc
(amino acids)
(SEQ ID NO: 102)
STSNLAS
Humanized E6 light chain variable framework region 3 (FWR3) acid sequence:
(DNA)
(SEQ ID NO: 103)
ggcatcccagccaggttcagtggcagtgggtctgggagcgactacactctcaccatcagcagcctagagcctgaagatttt
gcagtttattactgt
(amino acids)
(SEQ ID NO: 104)
GIPARFSGSGSGSDYTLTISSLEPEDFAVYYC
Humanized E6 light chain variable complementarity determining regions 3 (CDR3)
sequence:
(DNA)
(SEQ ID NO: 105)
cagcagcgtagcagctcccctttcacc
(amino acids)
(SEQ ID NO: 106)
QQRSSSPFT
Humanized E6 Kappa light chain synthesized by Genescript:
(DNA)
(SEQ ID NO: 107)
gaattctaagcttgggccaccatggaagccccagcgcagcttctcttcctcctgctactctggctcccagataccactgga
gaaattgtgttgacacagtctccagccaccctgtctttgtctccaggggaaagagccaccctcacctgcagcgccaccagc
agtgttagctacatccactggtaccaacagaggcctggccagagccccaggctcctcatctatagcacctccaacctggcc
agcggcatcccagccaggttcagtggcagtgggtctgggagcgactacactctcaccatcagcagcctagagcctgaagat
tttgcagtttattactgtcagcagcgtagcagctcccctttcacctttggcagcggcaccaaagtggaaattaaaaggacg
gtggctgcaccatctgtcttcatcttcccgccatctgatgagcagttgaaatctggaactgcctctgttgtgtgcctgctg
aataacttctatcccagagaggccaaagtacagtggaaggtggataacgccctccaatcgggtaactcccaggagagtgtc
acagagcaggacagcaaggacagcacctacagcctcagcagcaccctgacgctgagcaaagcagactacgagaaacacaaa
gtctacgcctgcgaagtcacccatcagggcctgagctcgcccgtcacaaagagcttcaacaggggagagtgttagtaagtt
taaactctaga
(amino acids)
(SEQ ID NO: 108)
EF*AWATMEAPAQLLFLLLLWLPDTTGEIVLTQSPATLSLSPGERATLTCSATSSVSYIHWYQQRPGQSPRLLIYSTSNLA
SGIPARFSGSGSGSDYTLTISSLEPEDFAVYYCQQRSSSPFTFGSGTKVEIKRTVAAPSVFIFPPSDEQLKSGTASVVCLL
NNFYPREAKVQWKVDNALQSGNSQESVTEQDSKDSTYSLSSTLTLSKADYEKHKVYACEVTHQGLSSPVTKSFNRGEC**V
*TLX
Human Kappa light chain constant region sequence:
(DNA)
(SEQ ID NO: 109)
aggacggtggctgcaccatctgtcttcatcttcccgccatctgatgagcagttgaaatctggaactgcctctgttgtgtgc
ctgctgaataacttctatcccagagaggccaaagtacagtggaaggtggataacgccctccaatcgggtaactcccaggag
agtgtcacagagcaggacagcaaggacagcacctacagcctcagcagcaccctgacgctgagcaaagcagactacgagaaa
cacaaagtctacgcctgcgaagtcacccatcagggcctgagctcgcccgtcacaaagagcttcaacaggggagagtgttag
(amino acids)
(SEQ ID NO: 110)
RTVAAPSVFIFPPSDEQLKSGTASVVCLLNNFYPREAKVQWKVDNALQSGNSQESVTEQDSKDSTYSLSSTLTLSKADYEK
HKVYACEVTHQGLSSPVTKSENRGEC
Humanized E6 lambda light chain sequence:
(DNA)
(SEQ ID NO: 111)
gaaattgtgttgacacagtctccagccaccctgtctttgtctccaggggaaagagccaccctcacctgcagcgccaccagc
agtgttagctacatccactggtaccaacagaggcctggccagagccccaggctcctcatctatagcacctccaacctggcc
agcggcatcccagccaggttcagtggcagtgggtctgggagcgactacactctcaccatcagcagcctagagcctgaagat
tttgcagtttattactgtcagcagcgtagcagctcccctttcacctttggcagcggcaccaaagtggaaattaaaggtcag
cccaaggctgccccctcggtcactctgttcccgccctcctctgaggagcttcaagccaacaaggccacactggtgtgtctc
ataagtgacttctacccgggagccgtgacagtggcctggaaggcagatagcagccccgtcaaggcgggagtggagaccacc
acaccctccaaacaaagcaacaacaagtacgcggccagcagctatctgagcctgacgcctgagcagtggaagtcccacaga
agctacagctgccaggtcacgcatgaagggagcaccgtggagaagacagtggcccctacagaatgttcatagtaa
(amino acids)
(SEQ ID NO: 112)
EIVLTQSPATLSLSPGERATLTCSATSSVSYIHWYQQRPGQSPRLLIYSTSNLASGIPARFSGSGSGSDYTLTISSLEPED
FAVYYCQQRSSSPFTFGSGTKVEIKGQPKAAPSVTLFPPSSEELQANKATLVCLISDFYPGAVTVAWKADSSPVKAGVETT
TPSKQSNNKYAASSYLSLTPEQWKSHRSYSCQVTHEGSTVEKTVAPTECS**
Humanized lambda light chain constant region sequence:
(DNA)
(SEQ ID NO: 113)
ggtcagcccaaggctgccccctcggtcactctgttcccgccctcctctgaggagcttcaagccaacaaggccacactggtg
tgtctcataagtgacttctacccgggagccgtgacagtggcctggaaggcagatagcagccccgtcaaggcgggagtggag
accaccacaccctccaaacaaagcaacaacaagtacgcggccagcagctatctgagcctgacgcctgagcagtggaagtcc
cacagaagctacagctgccaggtcacgcatgaagggagcaccgtggagaagacagtggcccctacagaatgttcatagtaa
(amino acids)
(SEQ ID NO: 114)
GQPKAAPSVTLFPPSSEELQANKATLVCLISDFYPGAVTVAWKADSSPVKAGVETTTPSKOSNNKYAASSYLSLTPEQWKS
HRSYSCQVTHEGSTVEKTVAPTECS**
Human lambda light chain constant region gBLOCK#3 sequence:
(DNA)
(SEQ ID NO: 115)
agcgccaccagcagtgttagctacatccactggtaccaacagaggcctggccagagccccaggctcctcatctatagcacc
tccaacctggccagcggcatcccagccaggttcagtggcagtgggtctgggagcgactacactctcaccatcagcagccta
gagcctgaagattttgcagtttattactgtcagcagcgtagcagctcccctttcacctttggcagcggcaccaaagtggaa
attaaaggtcagcccaaggctgccccctcggtcactctgttcccgccctcctctgaggagcttcaagccaacaaggccaca
ctggtgtgtctcataagtgacttctacccgggagccgtgacagtggcctggaaggcagatagcagccccgtcaaggcggga
gtggagaccaccacaccctccaaacaaagcaacaacaagtacgcggccagcagctatctgagcctgacgcctgagcagtgg
aagtcccacagaagctacagctgccaggtcacgcatgaagggagcaccgtggagaagacagtggcccctacagaatgttca
tagtaagtttaaacccgctgatcagcctcgactgtgccttctagttg
E6 light chain variable region overlapping sequence:
(DNA)
(SEQ ID NO: 116)
agcgccaccagcagtgttagctacatccact
pCDNA3.1 V5 and pSECTag2 overlapping sequence:
(DNA)
(SEQ ID NO: 117)
ccgctgatcagcctcgactgtgccttctagttg
Mouse C2 heavy chain variable region sequence:
(DNA)
(SEQ ID NO: 118)
gaggtccagctggaggagtcagggggaggcttagtgaagcctggagggtccctgaaactctcctgtgcagcctctggatt
cactttcagtggctatgccatgtcttgggttcgccagactccggagaagaggctggagtgggtcgcaaccattagtagtg
gtggtacttatatctactatccagacagtgtgaaggggcgattcaccatctccagagacaatgccaagaacaccctgtac
ctgcaaatgagcagtctgaggtctgaggacacggccatgtattactgtgcaagacttgggggggataattactacgaata
cttcgatgtctggggcgcagggaccacggtcaccgtctcctccgccaaaacgacacccccatctgtctat
(amino acids)
(SEQ ID NO: 119)
EVQLEESGGGLVKPGGSLKLSCAASGFTFSGYAMSWVRQTPEKRLEWVATISSGGTYIYYPDSVKGRFTISRDNAKNTLY
LQMSSLRSEDTAMYYCARLGGDNYYEYFDVWGAGTTVTVSSAKTTPPSVY
Mouse C2 heavy chain variable framework region 1 (FWR1) sequence:
(DNA)
(SEQ ID NO: 120)
gaggtccagctggaggagtcagggggaggcttagtgaagcctggagggtccctgaaactctcctgtgcagcctctggatt
cactttcagt
(amino acids)
(SEQ ID NO: 121)
EVQLEESGGGLVKPGGSLKLSCAASGFTFS
Mouse C2 heavy chain variable complementarity determining regions 1 (CDR1)
sequence:
(DNA)
(SEQ ID NO: 122)
ggctatgccatgtct
(amino acids)
(SEQ ID NO: 123)
GYAMS
Mouse C2 heavy chain variable framework region 2 (FWR2) sequence:
(DNA)
(SEQ ID NO: 124)
tgggttcgccagactccggagaagaggctggagtgggtcgca
(amino acids)
(SEQ ID NO: 125)
WVRQTPEKRLEWVA
Mouse C2 heavy chain variable complementarity determining regions 2 (CDR2)
sequence:
(DNA)
(SEQ ID NO: 126)
accattagtagtggtggtacttatatctactatccagacagtgtgaagggg
(amino acids)
(SEQ ID NO: 127)
TISSGGTYIYYPDSVKG
Mouse C2 heavy chain variable framework region 3 (FWR3) sequence:
(DNA)
(SEQ ID NO: 128)
cgattcaccatctccagagacaatgccaagaacaccctgtacctgcaaatgagcagtctgaggtctgaggacacggccatg
tattactgtgcaaga
(amino acids)
(SEQ ID NO: 129)
RFTISRDNAKNTLYLQMSSLRSEDTAMYYCAR
Mouse C2 heavy chain variable complementarity determining regions 3 (CDR3)
sequence:
(DNA)
(SEQ ID NO: 130)
cttgggggggataattactacgaatacttcgatgtc
(amino acids)
(SEQ ID NO: 131)
LGGDNYYEYFDV
IGHV3-21*04 heavy chain variable region sequence:
(DNA)
(SEQ ID NO: 132)
gaggtgcagctggtggagtctgggggaggcctggtcaagcctggggggtccctgagactctcctgtgcagcctctggatt
caccttcagtagctatagcatgaactgggtccgccaggctccagggaaggggctggagtgggtctcatccattagtagta
gtagtagttacatatactacgcagactcagtgaagggccgattcaccatctccagagacaacgccaagaactcactgtat
ctgcaaatgaacagcctgagagccgaggacacggccgtgtattactgtgcgaga
(amino acids)
(SEQ ID NO: 133)
EVQLVESGGGLVKPGGSLRLSCAASGFTFSSYSMNWVRQAPGKGLEWVSSISSSSSYIYYADSVKGRFTISRDNAKNSLY
LQMNSLRAEDTAVYYCAR
IGHV3-21*04 heavy chain variable framework region 1 (FWR1) sequence:
(DNA)
(SEQ ID NO: 134)
gaggtgcagctggtggagtctgggggaggcctggtcaagcctggggggtccctgagactctcctgtgcagcctctggatt
caccttcagt
(amino acids)
(SEQ ID NO: 135)
EVQLVESGGGLVKPGGSLRLSCAASGFTFS
IGHV3-21*04 heavy chain variable complementarity determining regions 1 (CDR1)
sequence:
(DNA)
(SEQ ID NO: 136)
agctatagcatgaac
(amino acids)
(SEQ ID NO: 137)
SYSMN
IGHV3-21*04 heavy chain variable framework region 2 (FWR2) sequence:
(DNA)
(SEQ ID NO: 138)
gggtccgccaggctccagggaaggggctggagtgggtctca
(amino acids)
(SEQ ID NO: 139)
WVRQAPGKGLEWVS
IGHV3-21*04 heavy chain variable complementarity determining regions 2 (CDR2)
sequence:
(DNA)
(SEQ ID NO: 140)
tccattagtagtagtagtagttacatatactacgcagactcagtgaagggc
(amino acids)
(SEQ ID NO: 141)
SISSSSSYIYYADSVKG
IGHV3-21*04 heavy chain variable framework region 3 (FWR3) sequence:
(DNA)
(SEQ ID NO: 142)
cgattcaccatctccagagacaacgccaagaactcactgtatctgcaaatgaacagcctgagagccgaggacacggccgt
gtattactgtgcgaga
(amino acids)
(SEQ ID NO: 143)
RFTISRDNAKNSLYLQMNSLRAEDTAVYYCAR
Humanized C2 heavy chain variable region sequence:
(DNA)
(SEQ ID NO: 144)
gaggtgcagctggtggagtctgggggaggcctggtcaagcctggggggtccctgagactctcctgtgcagcctctggattc
accttcagtggctatgccatgagctgggtccgccaggctccagggaaggggctggagtgggtctcaaccattagtagtggc
ggaacctacatatactaccccgactcagtgaagggccgattcaccatctccagagacaacgccaagaactcactgtatctg
caaatgaacagcctgagagccgaggacacggccgtgtattactgtgcgagacttgggggggataattactacgaatacttc
gatgtctggggcaaagggaccacggtcaccgtctcctcc
(amino acids)
(SEQ ID NO: 145)
EVQLVESGGGLVKPGGSLRLSCAASGFTFSGYAMSWVRQAPGKGLEWVSTISSGGTYIYYPDSVKGRFTISRDNAKNSLYL
QMNSLRAEDTAVYYCARLGGDNYYEYFDVWGKGTTVTVSS
Humanized C2 heavy chain variable framework region 1 (FWR1) sequence:
(DNA)
(SEQ ID NO: 146)
gaggtgcagctggtggagtctgggggaggcctggtcaagcctggggggtccctgagactctcctgtgcagcctctggattc
accttcagt
(amino acids)
(SEQ ID NO: 147)
EVQLVESGGGLVKPGGSLRLSCAASGFTFS
Humanized C2 heavy chain variable complementarity determining regions 1 (CDR1)
sequence:
(DNA)
(SEQ ID NO: 148)
ggctatgccatgagc
(amino acids)
(SEQ ID NO: 149)
GYAMS
Humanized C2 heavy chain variable framework region 2 (FWR2) sequence:
(DNA)
(SEQ ID NO: 150)
tgggtccgccaggctccagggaaggggctggagtgggtctcaa
(amino acids)
(SEQ ID NO: 151)
WVRQAPGKGLEWVS
Humanized C2 heavy chain variable complementarity determining regions 2 (CDR2)
sequence:
(DNA)
(SEQ ID NO: 152)
accattagtagtggcggaacctacatatactaccccgactcagtgaagggc
(amino acids)
(SEQ ID NO: 153)
TISSGGTYIYYPDSVKG
Humanized C2 heavy chain variable framework region 3 (FWR3) sequence:
(DNA)
(SEQ ID NO: 154)
cgattcaccatctccagagacaacgccaagaactcactgtatctgcaaatgaacagcctgagagccgaggacacggccgtg
tattactgtgcgaga
(amino acids)
(SEQ ID NO: 155)
RFTISRDNAKNSLYLQMNSLRAEDTAVYYCAR
Humanized C2 heavy chain variable complementarity determining regions 3 (CDR3)
sequence:
(DNA)
(SEQ ID NO: 156)
cttgggggggataattactacgaatacttcgatgtc
(amino acids)
(SEQ ID NO: 157)
LGGDNYYEYFDV
Humanized C2 IgG1 heavy chain sequence
(DNA)
(SEQ ID NO: 157)
gaggtgcagctggtggagtctgggggaggcctggtcaagcctggggggtccctgagactctcctgtgcagcctctggattc
accttcagtggctatgccatgagctgggtccgccaggctccagggaaggggctggagtgggtctcaaccattagtagtggc
ggaacctacatatactaccccgactcagtgaagggccgattcaccatctccagagacaacgccaagaactcactgtatctg
caaatgaacagcctgagagccgaggacacggccgtgtattactgtgcgagacttgggggggataattactacgaatacttc
gatgtctggggcaaagggaccacggtcaccgtctcctccgctagcaccaagggcccatcggtcttccccctggcaccctcc
tccaagagcacctctgggggcacagcggccctgggctgcctggtcaaggactacttccccgaaccggtgacggtgtcgtgg
aactcaggcgccctgaccagcggcgtgcacaccttcccggctgtcctacagtcctcaggactctactccctcagcagcgtg
gtgacagtgccctccagcagcttgggcacccagacctacatctgcaacgtgaatcacaagcccagcaacaccaaggtggac
aagaaagttgagcccaaatcttgtgacaaaactcacacatgcccaccgtgcccagcacctgaactcctggggggaccgtca
gtcttcctcttccccccaaaacccaaggacaccctcatgatctcccggacccctgaggtcacatgcgtggtggtggacgtg
agccacgaagaccctgaggtcaagttcaactggtacgtggacggcgtggaggtgcataatgccaagacaaagccgcgggag
gagcagtacaacagcacgtaccgtgtggtcagcgtcctcaccgtcctgcaccaggactggctgaatggcaaggagtacaag
tgcaaggtctccaacaaagccctcccagcccccatcgagaaaaccatctccaaagccaaagggcagccccgagaaccacag
gtgtacaccctgcccccatcccgggaggagatgaccaagaaccaggtcagcctgacctgcctggtcaaaggcttctatccc
agcgacatcgccgtggagtgggagagcaatgggcagccggagaacaactacaagaccacgcctcccgtgctggactccgac
ggctccttcttcctctacagcaagctcaccgtggacaagagcaggtggcagcaggggaacgtcttctcatgctccgtgatg
catgaggctctgcacaaccactacacgcagaagagcctctccctgtctccgggtaaatgataa
(amino acids)
(SEQ ID NO: 158)
EVQLVESGGGLVKPGGSLRLSCAASGFTFSGYAMSWVRQAPGKGLEWVSTISSGGTYIYYPDSVKGRFTISRDNAKNSLYL
QMNSLRAEDTAVYYCARLGGDNYYEYFDVWGKGTTVTVSSASTKGPSVFPLAPSSKSTSGGTAALGCLVKDYFPEPVTVSW
NSGALTSGVHTFPAVLQSSGLYSLSSVVTVPSSSLGTQTYICNVNHKPSNTKVDKKVEPKSCDKTHTCPPCPAPELLGGPS
VFLFPPKPKDTLMISRTPEVTCVVVDVSHEDPEVKFNWYVDGVEVHNAKTKPREEQYNSTYRVVSVLTVLHQDWLNGKEYK
CKVSNKALPAPIEKTISKAKGQPREPQVYTLPPSREEMTKNQVSLTCLVKGFYPSDIAVEWESNGQPENNYKTTPPVLDSD
GSFFLYSKLTVDKSRWQQGNVFSCSVMHEALHNHYTQKSLSLSPGK**
Humanized C2 gBLOCK#4 sequence:
(DNA)
(SEQ ID NO: 160)
actcactatagggagacccaagctggctagttaagcttgggccaccatggagacagacacactcctgctatgggtactgct
gctctgggttccaggttccactggtgacgaggtgcagctggtggagtctgggggaggcctggtcaagcctggggggtccct
gagactctcctgtgcagcctctggattcaccttcagtggctatgccatgagctgggtccgccaggctccagggaaggggct
ggagtgggtctcaaccattagtagtggcggaacctacatatactaccccgactcagtgaagggccgattcaccatctccag
agacaacgccaagaactcactgtatctgcaaatgaacagcctgagagccgaggacacggccgtgtattactgtgcgagact
tgggggggataattactacgaatacttcgatgtctggggcaaagggaccacggtcaccgtctcctccgctagcaccaaggg
cccatcggtcttccccctggcaccctcctccaagagcacctctgggggcacagcggccctgggctgcctggtcaaggacta
cttccccgaaccggtgacggtgtcgtggaactcaggcgccctgaccagc
pCDNA3.1 V5 overlapping sequence:
(DNA)
(SEQ ID NO: 161)
actcactatagggagacccaagctggctagtt
Human IgG1 constant region overlapping sequence:
(DNA)
(SEQ ID NO: 162)
gacggtgtcgtggaactcaggcgccctgaccagc
Humanized C2 IgG2 heavy chain sequence
(DNA)
(SEQ ID NO: 163)
gaggtgcagctggtggagtctgggggaggcctggtcaagcctggggggtccctgagactctcctgtgcagcctctggattc
accttcagtggctatgccatgagctgggtccgccaggctccagggaaggggctggagtgggtctcaaccattagtagtggc
ggaacctacatatactaccccgactcagtgaagggccgattcaccatctccagagacaacgccaagaactcactgtatctg
caaatgaacagcctgagagccgaggacacggccgtgtattactgtgcgagacttgggggggataattactacgaatacttc
gatgtctggggcaaagggaccacggtcaccgtctcctccgcctccaccaagggcccatcggtcttccccctggcgccctgc
tccaggagcacctccgagagcacagccgccctgggctgcctggtcaaggactacttccccgaaccggtgacggtgtcgtgg
aactcaggcgctctgaccagcggcgtgcacaccttcccagctgtcctacagtcctcaggactctactccctcagcagcgtg
gtgaccgtgccctccagcaacttcggcacccagacctacacctgcaacgtagatcacaagcccagcaacaccaaggtggac
aagacagttgagcgcaaatgttgtgtcgagtgcccaccgtgcccagcaccacctgtggcaggaccgtcagtcttcctcttc
cccccaaaacccaaggacaccctcatgatctcccggacccctgaggtcacgtgcgtggtggtggacgtgagccacgaagac
cccgaggtccagttcaactggtacgtggacggcgtggaggtgcataatgccaagacaaagccacgggaggagcagttcaac
agcacgttccgtgtggtcagcgtcctcaccgttgtgcaccaggactggctgaacggcaaggagtacaagtgcaaggtctcc
aacaaaggcctcccagcccccatcgagaaaaccatctccaaaaccaaagggcagccccgagaaccacaggtgtacaccctg
cccccatcccgggaggagatgaccaagaaccaggtcagcctgacctgcctggtcaaaggcttctaccccagcgacatcgcc
gtggagtgggagagcaatgggcagccggagaacaactacaagaccacacctcccatgctggactccgacggctccttcttc
ctctacagcaagctcaccgtggacaagagcaggtggcagcaggggaacgtcttctcatgctccgtgatgcatgaggctctg
cacaaccactacacgcagaagagcctctccctgtctccgggtaaatagtaa
(amino acids)
(SEQ ID NO: 164)
EVQLVESGGGLVKPGGSLRLSCAASGFTFSGYAMSWVRQAPGKGLEWVSTISSGGTYIYYPDSVKGRFTISRDNAKNSLYL
QMNSLRAEDTAVYYCARLGGDNYYEYFDVWGKGTTVTVSSASTKGPSVFPLAPCSRSTSESTAALGCLVKDYFPEPVTVSW
NSGALTSGVHTFPAVLQSSGLYSLSSVVTVPSSNFGTQTYTCNVDHKPSNTKVDKTVERKCCVECPPCPAPPVAGPSVFLF
PPKPKDTLMISRTPEVTCVVVDVSHEDPEVQFNWYVDGVEVHNAKTKPREEQFNSTFRVVSVLTVVHQDWLNGKEYKCKVS
NKGLPAPIEKTISKTKGQPREPQVYTLPPSREEMTKNQVSLTCLVKGFYPSDIAVEWESNGQPENNYKTTPPMLDSDGSFF
LYSKLTVDKSRWQQGNVFSCSVMHEALHNHYTQKSLSLSPGK**
Humanized C2 gBLOCK#5 sequence:
(DNA)
(SEQ ID NO: 165)
tgctctgggttccaggttccactggtgacgcggcccagccggccgaggtgcagctggtggagtctgggggaggcctggtca
agcctggggggtccctgagactctcctgtgcagcctctggattcaccttcagtggctatgccatgagctgggtccgccagg
ctccagggaaggggctggagtgggtctcaaccattagtagtggcggaacctacatatactaccccgactcagtgaagggcc
gattcaccatctccagagacaacgccaagaactcactgtatctgcaaatgaacagcctgagagccgaggacacggccgtgt
attactgtgcgagacttgggggggataattactacgaatacttcgatgtctggggcaaagggaccacggtcaccgtctcct
ccgcctccaccaagggcccatcggtcttccccctggcgccctgctccaggagcacctccgagagcacagccgccctgggct
gcctggtcaaggactacttccccgaaccggtgacggtgtcgtggaactcaggcgctctgacca
pSEC Tag2 overlapping sequence:
(DNA)
(SEQ ID NO: 166)
tgctctgggttccaggttccactggtgacgc
Human IgG2 constant region overlapping sequence:
(DNA)
(SEQ ID NO: 167)
gacggtgtcgtggaactcaggcgctctgacca
Mouse C2 light chain variable region sequence:
(DNA)
(SEQ ID NO: 168)
gacattgtgatcacacagtctacagcttccttaggtgtatctctggggcagagggccaccatctcatgcagggccagcaaa
agtgtcagtacatctggctatagttatatgcactggtaccaacagagaccaggacagccacccaaactcctcatctatctt
gcatccaacctagaatctggggtccctgccaggttcagtggcagtgggtctgggacagacttcaccctcaacatccatcct
gtggaggaggaggatgctgcaacctattactgtcagcacagtagggagcttccgttcacgttcggaggggggaccaagctg
gagataaaacgggctgatgctgcaccaactgtatcc
(amino acids)
(SEQ ID NO: 169)
DIVITQSTASLGVSLGQRATISCRASKSVSTSGYSYMHWYQQRPGQPPKLLIYLASNLESGVPARFSGSGSGTDFTLNIHP
VEEEDAATYYCQHSRELPFTFGGGTKLEIKRADAAPTVS
Mouse C2 light chain variable framework region 1 (FWR1) sequence:
(DNA)
(SEQ ID NO: 170)
gacattgtgatcacacagtctacagcttccttaggtgtatctctggggcagagggccaccatctcatgc
(amino acids)
(SEQ ID NO: 171)
DIVITQSTASLGVSLGQRATISC
Mouse C2 light chain variable complementarity determining regions 1 (CDR1)
sequence:
(DNA)
(SEQ ID NO: 172)
agggccagcaaaagtgtcagtacatctggctatagttatatgcac
(amino acids)
(SEQ ID NO: 173)
RASKSVSTSGYSYMH
Mouse C2 light chain variable framework region 2 (FWR2) sequence:
(DNA)
(SEQ ID NO: 174)
tggtaccaacagagaccaggacagccacccaaactcctcatctat
(amino acids)
(SEQ ID NO: 175)
WYQQRPGQPPKLLIY
Mouse C2 light chain variable complementarity determining regions 2 (CDR2)
sequence:
(DNA)
(SEQ ID NO: 176)
cttgcatccaacctagaatc
(amino acids)
(SEQ ID NO: 177)
LASNLES
Mouse C2 light chain variable framework region 3 (FWR3) sequence:
(DNA)
(SEQ ID NO: 178)
tggggtccctgccaggttcagtggcagtgggtctgggacagacttcaccctcaacatccatcctgtggaggaggaggatgc
tgcaacctattactgt
(amino acids)
(SEQ ID NO: 179)
GVPARFSGSGSGTDFTLNIHPVEEEDAATYYC
Mouse C2 light chain variable complementarity determining regions 3 (CDR3)
sequence:
(DNA)
(SEQ ID NO: 180)
cagcacagtagggagcttccgttcacg
(amino acids)
(SEQ ID NO: 181)
QHSRELPFT
IGKV7-3*01 light chain variable region sequence:
(DNA)
(SEQ ID NO: 182)
gacattgtgctgacccagtctccagcctccttggccgtgtctccaggacagagggccaccatcacctgcagagccagtgag
agtgtcagtttcttgggaataaacttaattcactggtatcagcagaaaccaggacaacctcctaaactcctgatttaccaa
gcatccaataaagacactggggtcccagccaggttcagcggcagtgggtctgggaccgatttcaccctcacaattaatcct
gtggaagctaatgatactgcaaattattactgtctgcagagtaagaattttcctcccaca
(amino acid)
(SEQ ID NO: 183)
DIVLTQSPASLAVSPGQRATITCRASESVSFLGINLIHWYQQKPGQPPKLLIYQASNKDTGVPARFSGSGSGTDFTLTINP
VEANDTANYYCLQSKNFPPT
IGKV7-3*01 light chain variable framework region 1 (FWR1) sequence:
(DNA)
(SEQ ID NO: 184)
gacattgtgctgacccagtctccagcctccttggccgtgtctccaggacagagggccaccatcacctgc
(amino acids)
(SEQ ID NO: 185)
DIVLTQSPASLAVSPGQRATITC
IGKV7-3*01 light chain variable complementarity determining regions 1 (CDR1)
sequence:
(DNA)
(SEQ ID NO: 186)
agagccagtgagagtgtcagtttcttgggaataaacttaattcac
(amino acids)
(SEQ ID NO: 187)
RASESVSFLGINLIH
IGKV7-3*01 light chain variable framework region 2 (FWR2) sequence:
(DNA)
(SEQ ID NO: 188)
tggtatcagcagaaaccaggacaacctcctaaactcctgatttac
(amino acids)
(SEQ ID NO: 189)
WYQQKPGQPPKLLIY
IGKV7-3*01 light chain variable complementarity determining regions 2 (CDR2)
sequence:
(DNA)
(SEQ ID NO: 190)
caagcatccaataaagacact
(amino acids)
(SEQ ID NO: 191)
QASNKDT
IGKV7-3*01 light chain variable framework region 3 (FWR3) sequence:
(DNA)
(SEQ ID NO: 192)
ggggtcccagccaggttcagcggcagtgggtctgggaccgatttcaccctcacaattaatcctgtggaagctaatgatact
gcaaattattactgt
(amino acids)
(SEQ ID NO: 193)
GVPARFSGSGSGTDFTLTINPVEANDTANYYC
Humanized C2 light chain variable region sequence:
(DNA)
(SEQ ID NO: 194)
gacattgtgctgacccagtctccagcctccttggccgtgtctccaggacagagggccaccatcacctgcagagccagtaag
agtgtcagtaccagcggatactcctacatgcactggtatcagcagaaaccaggacaacctcctaaactcctgatttacctg
gcatccaatctggagagcggggtcccagccaggttcagcggcagtgggtctgggaccgatttcaccctcacaattaatcct
gtggaagctaatgatactgcaaattattactgtcagcacagtagggagctgcctttcacattcggcggagggaccaaggtg
gagatcaaacgaact
(amino acids)
(SEQ ID NO: 195)
DIVLTQSPASLAVSPGQRATITCRASKSVSTSGYSYMHWYQQKPGQPPKLLIYLASNLESGVPARFSGSGSGTDFTLTINP
VEANDTANYYCQHSRELPFTFGGGTKVEIKRT
Humanized C2 light chain variable framework region 1 (FWR1) acid sequence:
(DNA)
(SEQ ID NO: 196)
gacattgtgctgacccagtctccagcctccttggccgtgtctccaggacagagggccaccatcacctgc
(amino acids)
(SEQ ID NO: 197)
DIVLTQSPASLAVSPGQRATITC
Humanized C2 light chain variable complementarity determining regions 1 (CDR1)
sequence:
(DNA)
(SEQ ID NO: 198)
agagccagtaagagtgtcagtaccagcggatactcctacatgcac
(amino acids)
(SEQ ID NO: 199)
RASKSVSTSGYSYMH
Humanized C2 heavy light variable framework region 2 (FWR2) acid sequence:
(DNA)
(SEQ ID NO: 200)
tggtatcagcagaaaccaggacaacctcctaaactcctgatttac
(amino acids)
(SEQ ID NO: 201)
WYQQKPGQPPKLLIY
Humanized C2 light chain variable complementarity determining regions 2 (CDR2)
sequence:
(DNA)
(SEQ ID NO: 202)
ctggcatccaatctggagagc
(amino acids)
(SEQ ID NO: 203)
LASNLES
Humanized C2 light chain variable framework region 3 (FWR3) acid sequence:
(DNA)
(SEQ ID NO: 204)
ggggtcccagccaggttcagcggcagtgggtctgggaccgatttcaccctcacaattaatcctgtggaagctaatgatact
gcaaattattactgt
(amino acids)
(SEQ ID NO: 205)
GVPARFSGSGSGTDFTLTINPVEANDTANYYC
Humanized C2 light chain variable complementarity determining regions 3 (CDR3)
sequence:
(DNA)
(SEQ ID NO: 206)
cagcacagtagggagctgcctttcaca
(amino acids)
(SEQ ID NO: 207)
QHSRELPFT
Humanized C2 light chain variable complementarity determining regions 3 (CDR3)
sequence:
(DNA)
(SEQ ID NO: 208)
ctgcagagtaagaattttcctcccaca
(amino acids)
(SEQ ID NO: 209)
LQSKNFPPT
Humanized C2 gBLOCK#6 sequence (Kappa light chain in pCDNA3.1 V5):
(DNA)
(SEQ ID NO: 210)
actcactatagggagacccaagctggctagttaagcttgggccaccatggagacagacacactcctgctatgggtactgct
gctctgggttccaggttccactggtgacgacattgtgctgacccagtctccagcctccttggccgtgtctccaggacagag
ggccaccatcacctgcagagccagtaagagtgtcagtaccagcggatactcctacatgcactggtatcagcagaaaccagg
acaacctcctaaactcctgatttacctggcatccaatctggagagcggggtcccagccaggttcagcggcagtgggtctgg
gaccgatttcaccctcacaattaatcctgtggaagctaatgatactgcaaattattactgtcagcacagtagggagctgcc
tttcacattcggcggagggaccaaggtggagatcaaacgaactacggtggctgcaccatctgtcttcatcttcccgccatc
tgatgagcagttgaaatctggaactgcctctgttgtgtgcctgctgaataacttctatcccagagaggccaaagtacagtg
gaaggtggataacgccctccaatcgggtaactcccaggagagtgtcacagagcaggacagcaaggacagcacctacagcct
cagcagcaccctgacgctgagcaaagcagactacgagaaacacaaagtctacgcctgcgaagtcacccatcagggcctgag
ctcgcccgtcacaaagagcttcaacaggggagagtgttagtaagtttaaacccgctgatcagcctcgactgtgccttctag
ttg
pCDNA3.1 V5 5′ overlapping sequence:
(DNA)
(SEQ ID NO: 211)
actcactatagggagacccaagctggctagtt
pCDNA3.1 V5 3′ overlapping sequence:
(DNA)
(SEQ ID NO: 212)
ccgctgatcagcctcgactgtgccttctagttg
Humanized C2 gBLOCK#7 sequence (Kappa light chain in pSEC Tag2):
(DNA)
(SEQ ID NO: 213)
tgctctgggttccaggttccactggtgacgcggcccagccggccgacattgtgctgacccagtctccagcctccttggccg
tgtctccaggacagagggccaccatcacctgcagagccagtaagagtgtcagtaccagcggatactcctacatgcactggt
atcagcagaaaccaggacaacctcctaaactcctgatttacctggcatccaatctggagagcggggtcccagccaggttca
gcggcagtgggtctgggaccgatttcaccctcacaattaatcctgtggaagctaatgatactgcaaattattactgtcagc
acagtagggagctgcctttcacattcggcggagggaccaaggtggagatcaaacgaactacggtggctgcaccatctgtct
tcatcttcccgccatctgatgagcagttgaaatctggaactgcctctgttgtgtgcctgctgaataacttctatcccagag
aggccaaagtacagtggaaggtggataacgccctccaatcgggtaactcccaggagagtgtcacagagcaggacagcaagg
acagcacctacagcctcagcagcaccctgacgctgagcaaagcagactacgagaaacacaaagtctacgcctgcgaagtca
cccatcagggcctgagctcgcccgtcacaaagagcttcaacaggggagagtgttagtaagtttaaacccgctgatcagcct
cgactgtgccttctagttg
pSEC Tag2 5′ overlapping sequence:
(DNA)
(SEQ ID NO: 214)
tgctctgggttccaggttccactggtgacgc
pSEC Tag2 3′ overlapping sequence:
(DNA)
(SEQ ID NO: 215)
ccgctgatcagcctcgactgtgccttctagttg
Humanized C2 gBLOCK#8 sequence (lambda light chain in pCDNA3.1 V5):
(DNA)
(SEQ ID NO: 216)
actcactatagggagacccaagctggctagttaagcttgggccaccatggagacagacacactcctgctatgggtactgct
gctctgggttccaggttccactggtgacgacattgtgctgacccagtctccagcctccttggccgtgtctccaggacagag
ggccaccatcacctgcagagccagtaagagtgtcagtaccagcggatactcctacatgcactggtatcagcagaaaccagg
acaacctcctaaactcctgatttacctggcatccaatctggagagcggggtcccagccaggttcagcggcagtgggtctgg
gaccgatttcaccctcacaattaatcctgtggaagctaatgatactgcaaattattactgtcagcacagtagggagctgcc
tttcacattcggcggagggaccaaggtggagatcaaacgaactggtcagcccaaggctgccccctcggtcactctgttccc
gccctcctctgaggagcttcaagccaacaaggccacactggtgtgtctcataagtgacttctacccgggagccgtgacagt
ggcctggaaggcagatagcagccccgtcaaggcgggagtggagaccaccacaccctccaaacaaagcaacaacaagtacgc
ggccagcagctatctgagcctgacgcctgagcagtggaagtcccacagaagctacagctgccaggtcacgcatgaagggag
caccgtggagaagacagtggcccctacagaatgttcatagtaagtttaaacccgctgatcagcctcgactgtgccttctag
ttg
pCDNA3.1 V5 5′ overlapping sequence:
(DNA)
(SEQ ID NO: 217)
actcactatagggagacccaagctggctagtt
pCDNA3.1 V5 3′ overlapping sequence:
(DNA)
(SEQ ID NO: 218)
ccgctgatcagcctcgactgtgccttctagttg
Humanized C2 gBLOCK#9 sequence (lambda light chain in pSEC Tag2):
(DNA)
(SEQ ID NO: 219)
tgctctgggttccaggttccactggtgacgcggcccagccggccgacattgtgctgacccagtctccagcctccttggccg
tgtctccaggacagagggccaccatcacctgcagagccagtaagagtgtcagtaccagcggatactcctacatgcactggt
atcagcagaaaccaggacaacctcctaaactcctgatttacctggcatccaatctggagagcggggtcccagccaggttca
gcggcagtgggtctgggaccgatttcaccctcacaattaatcctgtggaagctaatgatactgcaaattattactgtcagc
acagtagggagctgcctttcacattcggcggagggaccaaggtggagatcaaacgaactggtcagcccaaggctgccccct
cggtcactctgttcccgccctcctctgaggagcttcaagccaacaaggccacactggtgtgtctcataagtgacttctacc
cgggagccgtgacagtggcctggaaggcagatagcagccccgtcaaggcgggagtggagaccaccacaccctccaaacaaa
gcaacaacaagtacgcggccagcagctatctgagcctgacgcctgagcagtggaagtcccacagaagctacagctgccagg
tcacgcatgaagggagcaccgtggagaagacagtggcccctacagaatgttcatagtaagtttaaacccgctgatcagcct
cgactgtgccttctagttg
pSEC Tag2 5′ overlapping sequence:
(DNA)
(SEQ ID NO: 220)
tgctctgggttccaggttccactggtgacgc
pSEC Tag2 3′ overlapping sequence:
(DNA)
(SEQ ID NO: 221)
ccgctgatcagcctcgactgtgccttctagttg
Murine Ig kappa chain leader sequence
(DNA)
(SEQ ID NO: 222)
atggagacagacacactcctgctatgggtactgctgctctgggttccaggttccactggtgac
(amino acids)
(SEQ ID NO: 223)
METDTLLLWVLLLWVPGSTGD
Interleukin-2 (IL-2) leader sequence
(DNA)
(SEQ ID NO: 224)
atgtacaggatgcaactcctgtcttgcattgcactaagtcttgcacttgtcacaaacagt
(amino acids)
(SEQ ID NO: 225)
MYRMQLLSCIALSLALVINS
CD33 leader sequence
(DNA)
(SEQ ID NO: 226)
atgcctcttctgcttctgcttcctctgctttgggctggagctcttgct
(amino acids)
(SEQ ID NO: 227)
MPLLLLLPLLWAGALA
IGHV3-21*03 leader sequence
(DNA)
(SEQ ID NO: 228)
atggaactggggctccgctgggttttccttgttgctattttagaaggtgtccagtgt
(amino acids)
(SEQ ID NO: 229)
MELGLRWVFLVAILEGVQC
IGHV3-11*02 leader sequence
(DNA)
(SEQ ID NO: 230)
atggaagccccagcgcagcttctcttcctcctgctactctggctcccagataccactgga
(amino acids)
(SEQ ID NO: 231)
MEAPAQLLFLLLLWLPDTTG
Humanized E6 single chain GS3
(DNA)
(SEQ ID NO: 232)
gaggtgcagctggtggagtctgggggaggcctggtcaagcctggggggtccctgagactctcctgtgcagcctctggattc
accttcagtaggtatggcatgagctgggtccgccaggctccagggaagaggctggagtgggtctcaaccattagtggcgga
ggcacctacatatactacccagactcagtgaagggccgattcaccatctccagagacaacgccaagaacaccctgtatctg
caaatgaacagcctgagagccgaggacacggctgtgtattactgtaccagagataactatggccgcaactatgattatggc
atggattattggggccagggcaccctggtgaccgtgagcagcggcggtggcggatccggcggtggcggatccggcggtggc
ggatccgaaattgtgttgacacagtctccagccaccctgtctttgtctccaggggaaagagccaccctcacctgcagcgcc
accagcagtgttagctacatccactggtaccaacagaggcctggccagagccccaggctcctcatctatagcacctccaac
ctggccagcggcatcccagccaggttcagtggcagtgggtctgggagcgactacactctcaccatcagcagcctagagcct
gaagattttgcagtttattactgtcagcagcgtagcagctcccctttcacctttggcagcggcaccaaagtggaaattaaa
(amino acids)
(SEQ ID NO: 233)
EVQLVESGGGLVKPGGSLRLSCAASGFTFSRYGMSWVRQAPGKRLEWVSTISGGGTYIYYPDSVKGRFTISRDNAKNTLY
LQMNSLRAEDTAVYYCTRDNYGRNYDYGMDYWGQGTLVTVSSGGGGSGGGGSGGGGSEIVLTQSPATLSLSPGERATLTC
SATSSVSYIHWYQQRPGQSPRLLIYSTSNLASGIPARFSGSGSGSDYTLTISSLEPEDFAVYYCQQRSSSPFTFGSGTKV
EIK
Humanized E6 single chain IgG1noC
(DNA)
(SEQ ID NO: 234)
gaggtgcagctggtggagtctgggggaggcctggtcaagcctggggggtccctgagactctcctgtgcagcctctggattc
accttcagtaggtatggcatgagctgggtccgccaggctccagggaagaggctggagtgggtctcaaccattagtggcgga
ggcacctacatatactacccagactcagtgaagggccgattcaccatctccagagacaacgccaagaacaccctgtatctg
caaatgaacagcctgagagccgaggacacggctgtgtattactgtaccagagataactatggccgcaactatgattatggc
atggattattggggccagggcaccctggtgaccgtgagcagcgataaaacccatactaaaccgccaaaaccggcgccggaa
ctgctgggtggtcctggtaccggtgaaattgtgttgacacagtctccagccaccctgtctttgtctccaggggaaagagcc
accctcacctgcagcgccaccagcagtgttagctacatccactggtaccaacagaggcctggccagagccccaggctcctc
atctatagcacctccaacctggccagcggcatcccagccaggttcagtggcagtgggtctgggagcgactacactctcacc
atcagcagcctagagcctgaagattttgcagtttattactgtcagcagcgtagcagctcccctttcacctttggcagcggc
accaaagtggaaattaaa
(amino acids)
(SEQ ID NO: 235)
EVQLVESGGGLVKPGGSLRLSCAASGFTFSRYGMSWVRQAPGKRLEWVSTISGGGTYIYYPDSVKGRFTISRDNAKNTLY
LQMNSLRAEDTAVYYCTRDNYGRNYDYGMDYWGQGTLVTVSSDKTHTKPPKPAPELLGGPGTGEIVLTQSPATLSLSPGE
RATLTCSATSSVSYIHWYQQRPGQSPRLLIYSTSNLASGIPARFSGSGSGSDYTLTISSLEPEDFAVYYCQQRSSSPFTF
GSGTKVEIK
Humanized E6 single chain X4 (linker is IgG1 and IgG2 modified hinge region)
(DNA)
(SEQ ID NO: 236)
gaggtgcagctggtggagtctgggggaggcctggtcaagcctggggggtccctgagactctcctgtgcagcctctggattc
accttcagtaggtatggcatgagctgggtccgccaggctccagggaagaggctggagtgggtctcaaccattagtggcgga
ggcacctacatatactacccagactcagtgaagggccgattcaccatctccagagacaacgccaagaacaccctgtatctg
caaatgaacagcctgagagccgaggacacggctgtgtattactgtaccagagataactatggccgcaactatgattatggc
atggattattggggccagggcaccctggtgaccgtgagcagcgataaaacccatactaaaccgccaaaaccggcgccggaa
ctgctgggtggtcctggtaccggtactggtggtccgactattaaacctccgaaacctccgaaacctgctccgaacctgctg
ggtggtccggaaattgtgttgacacagtctccagccaccctgtctttgtctccaggggaaagagccaccctcacctgcagc
gccaccagcagtgttagctacatccactggtaccaacagaggcctggccagagccccaggctcctcatctatagcacctcc
aacctggccagcggcatcccagccaggttcagtggcagtgggtctgggagcgactacactctcaccatcagcagcctagag
cctgaagattttgcagtttattactgtcagcagcgtagcagctcccctttcacctttggcagcggcaccaaagtggaaatt
aaa
(amino acids)
(SEQ ID NO: 237)
EVQLVESGGGLVKPGGSLRLSCAASGFTFSRYGMSWVRQAPGKRLEWVSTISGGGTYIYYPDSVKGRFTISRDNAKNTLY
LQMNSLRAEDTAVYYCTRDNYGRNYDYGMDYWGQGTLVTVSSDKTHTKPPKPAPELLGGPGTGTGGPTIKPPKPPKPAPN
LLGGPEIVLTQSPATLSLSPGERATLTCSATSSVSYIHWYQQRPGQSPRLLIYSTSNLASGIPARFSGSGSGSDYTLTIS
SLEPEDFAVYYCQQRSSSPFTFGSGTKVEIK
Humanized C2 single chain GS3
(DNA)
(SEQ ID NO: 238)
gaggtgcagctggtggagtctgggggaggcctggtcaagcctggggggtccctgagactctcctgtgcagcctctggattc
accttcagtggctatgccatgagctgggtccgccaggctccagggaaggggctggagtgggtctcaaccattagtagtggc
ggaacctacatatactaccccgactcagtgaagggccgattcaccatctccagagacaacgccaagaactcactgtatctg
caaatgaacagcctgagagccgaggacacggccgtgtattactgtgcgagacttgggggggataattactacgaatacttc
gatgtctggggcaaagggaccacggtcaccgtctcctccggcggtggcggatccggcggtggcggatccggcggtggcgga
tccgacattgtgctgacccagtctccagcctccttggccgtgtctccaggacagagggccaccatcacctgcagagccagt
aagagtgtcagtaccagcggatactcctacatgcactggtatcagcagaaaccaggacaacctcctaaactcctgatttac
ctggcatccaatctggagagcggggtcccagccaggttcagcggcagtgggtctgggaccgatttcaccctcacaattaat
cctgtggaagctaatgatactgcaaattattactgtcagcacagtagggagctgcctttcacattcggcggagggaccaag
gtggagatcaaacgaact
(amino acids)
(SEQ ID NO: 239)
EVQLVESGGGLVKPGGSLRLSCAASGFTFSGYAMSWVRQAPGKGLEWVSTISSGGTYIYYPDSVKGRFTISRDNAKNSLY
LQMNSLRAEDTAVYYCARLGGDNYYEYFDVWGKGTTVTVSSGGGGSGGGGSGGGGSDIVLTQSPASLAVSPGQRATITCR
ASKSVSTSGYSYMHWYQQKPGQPPKLLIYLASNLESGVPARFSGSGSGTDFTLTINPVEANDTANYYCQHSRELPFTEGG
GTKVEIKRT
Humanized C2 single chain IgG (no Cysteine)
(DNA)
(SEQ ID NO: 240)
gaggtgcagctggtggagtctgggggaggcctggtcaagcctggggggtccctgagactctcctgtgcagcctctggattc
accttcagtggctatgccatgagctgggtccgccaggctccagggaaggggctggagtgggtctcaaccattagtagtggc
ggaacctacatatactaccccgactcagtgaagggccgattcaccatctccagagacaacgccaagaactcactgtatctg
caaatgaacagcctgagagccgaggacacggccgtgtattactgtgcgagacttgggggggataattactacgaatacttc
gatgtctggggcaaagggaccacggtcaccgtctcctccgataaaacccatactaaaccgccaaaaccggcgccggaactg
ctgggtggtcctggtaccggtgacattgtgctgacccagtctccagcctccttggccgtgtctccaggacagagggccacc
atcacctgcagagccagtaagagtgtcagtaccagcggatactcctacatgcactggtatcagcagaaaccaggacaacct
cctaaactcctgatttacctggcatccaatctggagagcggggtcccagccaggttcagcggcagtgggtctgggaccgat
ttcaccctcacaattaatcctgtggaagctaatgatactgcaaattattactgtcagcacagtagggagctgcctttcaca
ttcggcggagggaccaaggtggagatcaaacgaact
(amino acids)
(SEQ ID NO: 241)
EVQLVESGGGLVKPGGSLRLSCAASGFTFSGYAMSWVRQAPGKGLEWVSTISSGGTYIYYPDSVKGRFTISRDNAKNSLY
LQMNSLRAEDTAVYYCARLGGDNYYEYFDVWGKGTTVTVSSDKTHTKPPKPAPELLGGPGTGDIVLTQSPASLAVSPGQR
ATITCRASKSVSTSGYSYMHWYQQKPGQPPKLLIYLASNLESGVPARFSGSGSGTDFTLTINPVEANDTANYYCQHSREL
PFTFGGGTKVEIKRT
Humanized C2 single chain X4 (linker is IgG1 and IgG2 modified hinge region)
(DNA)
(SEQ ID NO: 242)
gaggtgcagctggtggagtctgggggaggcctggtcaagcctggggggtccctgagactctcctgtgcagcctctggattc
accttcagtggctatgccatgagctgggtccgccaggctccagggaaggggctggagtgggtctcaaccattagtagtggc
ggaacctacatatactaccccgactcagtgaagggccgattcaccatctccagagacaacgccaagaactcactgtatctg
caaatgaacagcctgagagccgaggacacggccgtgtattactgtgcgagacttgggggggataattactacgaatacttc
gatgtctggggcaaagggaccacggtcaccgtctcctccgataaaacccatactaaaccgccaaaaccggcgccggaactg
ctgggtggtcctggtaccggtactggtggtccgactattaaacctccgaaacctccgaaacctgctccgaacctgctgggt
ggtccggacattgtgctgacccagtctccagcctccttggccgtgtctccaggacagagggccaccatcacctgcagagcc
agtaagagtgtcagtaccagcggatactcctacatgcactggtatcagcagaaaccaggacaacctcctaaactcctgatt
tacctggcatccaatctggagagcggggtcccagccaggttcagcggcagtgggtctgggaccgatttcaccctcacaatt
aatcctgtggaagctaatgatactgcaaattattactgtcagcacagtagggagctgcctttcacattcggcggagggacc
aaggtggagatcaaacgaact
(amino acids)
(SEQ ID NO: 243)
EVQLVESGGGLVKPGGSLRLSCAASGFTFSGYAMSWVRQAPGKGLEWVSTISSGGTYIYYPDSVKGRFTISRDNAKNSLY
LQMNSLRAEDTAVYYCARLGGDNYYEYFDVWGKGTTVTVSSDKTHTKPPKPAPELLGGPGTGTGGPTIKPPKPPKPAPNL
LGGPDIVLTQSPASLAVSPGQRATITCRASKSVSTSGYSYMHWYQQKPGQPPKLLIYLASNLESGVPARFSGSGSGTDFT
LTINPVEANDTANYYCQHSRELPFTFGGGTKVEIKRT
Humanized C3 single chain GS3
(DNA)
(SEQ ID NO: 244)
caggttcagctggtgcagtctggagctgaggtgaagaagcctggggcctcagtgaaggtctcctgcaaggcttctggttac
acctttaccgactacgccatgaactgggtgcgacaggcccctggacaagggcttgagtggatgggagtgatcagcaccttc
agcggtaacacaaacttcaaccagaagttcaagggcagagtcaccatgaccacagacacatccacgagcacagcctacatg
gagctgaggagcctgagatctgacgacacggccgtgtattactgtgcgagaagcgactactacggcccatacttcgactac
tggggccagggcaccaccctgaccgtgtccagcggcggtggcggatccggcggtggcggatccggcggtggcggatccgat
attgtgatgacccagactccactctctctgtccgtcacccctggacagccggcctccatctcctgcaggtctagtcagacc
attgtccatagtaatggaaacacctatttggagtggtacctgcagaagccaggccagtctccacagctcctgatctataag
gtttccaaccggttctctggagtgccagataggttcagtggcagcgggtcagggacagatttcacactgaaaatcagccgg
gtggaggctgaggatgttggggtttattactgcttccaaggtagccacgtgcctttcaccttcggcggagggaccaaggtg
gagatcaaacgaact
(amino acids)
(SEQ ID NO: 245)
QVQLVQSGAEVKKPGASVKVSCKASGYTFTDYAMNWVRQAPGQGLEWMGVISTFSGNTNFNQKFKGRVTMTTDTSTSTAYM
ELRSLRSDDTAVYYCARSDYYGPYFDYWGQGTTLTVSSGGGGSGGGGSGGGGSDIVMTQTPLSLSVTPGQPASISCRSSQ
TIVHSNGNTYLEWYLQKPGQSPQLLIYKVSNRFSGVPDRFSGSGSGTDFTLKISRVEAEDVGVYYCFQGSHVPFTFGGGT
KVEIKRT
Humanized C3 single chain IgG1 (no Cysteine)
(DNA)
(SEQ ID NO: 246)
caggttcagctggtgcagtctggagctgaggtgaagaagcctggggcctcagtgaaggtctcctgcaaggcttctggttac
acctttaccgactacgccatgaactgggtgcgacaggcccctggacaagggcttgagtggatgggagtgatcagcaccttc
agcggtaacacaaacttcaaccagaagttcaagggcagagtcaccatgaccacagacacatccacgagcacagcctacatg
gagctgaggagcctgagatctgacgacacggccgtgtattactgtgcgagaagcgactactacggcccatacttcgactac
tggggccagggcaccaccctgaccgtgtccagcgataaaacccatactaaaccgccaaaaccggcgccggaactgctgggt
ggtcctggtaccggtgatattgtgatgacccagactccactctctctgtccgtcacccctggacagccggcctccatctcc
tgcaggtctagtcagaccattgtccatagtaatggaaacacctatttggagtggtacctgcagaagccaggccagtctcca
cagctcctgatctataaggtttccaaccggttctctggagtgccagataggttcagtggcagcgggtcagggacagatttc
acactgaaaatcagccgggtggaggctgaggatgttggggtttattactgcttccaaggtagccacgtgcctttcaccttc
ggcggagggaccaaggtggagatcaaacgaact
(amino acids)
(SEQ ID NO: 247)
QVQLVQSGAEVKKPGASVKVSCKASGYTFTDYAMNWVRQAPGQGLEWMGVISTFSGNTNFNQKFKGRVTMTTDTSTSTAYM
ELRSLRSDDTAVYYCARSDYYGPYFDYWGQGTTLTVSSDKTHTKPPKPAPELLGGPGTGDIVMTQTPLSLSVTPGQPASI
SCRSSQTIVHSNGNTYLEWYLQKPGQSPQLLIYKVSNRFSGVPDRFSGSGSGTDFTLKISRVEAEDVGVYYCFQGSHVPF
TFGGGTKVEIKRT
Humanized C3 single chain X4 (linker is IgG1 and IgG2 modified hinge region)
(DNA)
(SEQ ID NO: 248)
caggttcagctggtgcagtctggagctgaggtgaagaagcctggggcctcagtgaaggtctcctgcaaggcttctggttac
acctttaccgactacgccatgaactgggtgcgacaggcccctggacaagggcttgagtggatgggagtgatcagcaccttc
agcggtaacacaaacttcaaccagaagttcaagggcagagtcaccatgaccacagacacatccacgagcacagcctacatg
gagctgaggagcctgagatctgacgacacggccgtgtattactgtgcgagaagcgactactacggcccatacttcgactac
tggggccagggcaccaccctgaccgtgtccagcgataaaacccatactaaaccgccaaaaccggcgccggaactgctgggt
ggtcctggtaccggtactggtggtccgactattaaacctccgaaacctccgaaacctgctccgaacctgctgggtggtccg
gatattgtgatgacccagactccactctctctgtccgtcacccctggacagccggcctccatctcctgcaggtctagtcag
accattgtccatagtaatggaaacacctatttggagtggtacctgcagaagccaggccagtctccacagctcctgatctat
aaggtttccaaccggttctctggagtgccagataggttcagtggcagcgggtcagggacagatttcacactgaaaatcagc
cgggtggaggctgaggatgttggggtttattactgcttccaaggtagccacgtgcctttcaccttcggcggagggaccaag
gtggagatcaaacgaact
(amino acids)
(SEQ ID NO: 249)
QVQLVQSGAEVKKPGASVKVSCKASGYTFTDYAMNWVRQAPGQGLEWMGVISTFSGNTNFNQKFKGRVTMTTDTSTSTAYM
ELRSLRSDDTAVYYCARSDYYGPYFDYWGQGTTLTVSSDKTHTKPPKPAPELLGGPGTGTGGPTIKPPKPPKPAPNLLGG
PDIVMTQTPLSLSVTPGQPASISCRSSQTIVHSNGNTYLEWYLQKPGQSPQLLIYKVSNRFSGVPDRESGSGSGTDFTLK
ISRVEAEDVGVYYCFQGSHVPFTFGGGTKVEIKRT
Humanized C8 single chain GS3 (linker is [Gly₄Ser₁]₃)
(DNA)
(SEQ ID NO: 250)
gaggtgcagctggtggagtctgggggaggcctggtcaagcctggggggtccctgagactctcctgtgcagcctctggattc
accttcagtggctatgccatgagctgggtccgccaggctccagggaaggggctggagtgggtctcaaccattagtagtggc
ggaacctacatatactaccctgactcagtgaagggccgattcaccatctccagagacaacgccaagaactcactgtatctg
caaatgaacagcctgagagccgaggacacggccgtgtattactgtgcgagactgggcggcgataactattatgaatattgg
ggcaaagggaccacggtcaccgtctcctccggcggtggcggatccggcggtggcggatccggcggtggcggatccgacatc
gtgatgacccagtctccagactccctggctgtgtctctgggcgagagggccaccatcaactgcagggccagcaagagtgtt
agcaccagcggctacagctacatgcactggtaccagcagaaaccaggacagcctcctaagctgctcatttacctggtgtct
aacctggaatccggggtccctgaccgattcagtggcagcgggtctgggacagatttcactctcaccatcagcagcctgcag
gctgaagatgtggcagtttattactgtcaacacattcgggaactgaccaggagtgaattcggcggagggaccaaggtggag
atcaaacgaact
(amino acids)
(SEQ ID NO: 251)
EVQLVESGGGLVKPGGSLRLSCAASGFTFSGYAMSWVRQAPGKGLEWVSTISSGGTYIYYPDSVKGRFTISRDNAKNSLY
LQMNSLRAEDTAVYYCARLGGDNYYEYWGKGTTVTVSSGGGGSGGGGSGGGGSDIVMTQSPDSLAVSLGERATINCRASK
SVSTSGYSYMHWYQQKPGQPPKLLIYLVSNLESGVPDRFSGSGSGTDFTLTISSLQAEDVAVYYCQHIRELTRSEFGGGT
KVEIKRT
Humanized C8 single chain IgG1 (no Cysteine)
(DNA)
(SEQ ID NO: 252)
gaggtgcagctggtggagtctgggggaggcctggtcaagcctggggggtccctgagactctcctgtgcagcctctggattc
accttcagtggctatgccatgagctgggtccgccaggctccagggaaggggctggagtgggtctcaaccattagtagtggc
ggaacctacatatactaccctgactcagtgaagggccgattcaccatctccagagacaacgccaagaactcactgtatctg
caaatgaacagcctgagagccgaggacacggccgtgtattactgtgcgagactgggcggcgataactattatgaatattgg
ggcaaagggaccacggtcaccgtctcctccgataaaacccatactaaaccgccaaaaccggcgccggaactgctgggtggt
cctggtaccggtgacatcgtgatgacccagtctccagactccctggctgtgtctctgggcgagagggccaccatcaactgc
agggccagcaagagtgttagcaccagcggctacagctacatgcactggtaccagcagaaaccaggacagcctcctaagctg
ctcatttacctggtgtctaacctggaatccggggtccctgaccgattcagtggcagcgggtctgggacagatttcactctc
accatcagcagcctgcaggctgaagatgtggcagtttattactgtcaacacattcgggaactgaccaggagtgaattcggc
ggagggaccaaggtggagatcaaacgaact
(amino acids)
(SEQ ID NO: 253)
EVQLVESGGGLVKPGGSLRLSCAASGFTFSGYAMSWVRQAPGKGLEWVSTISSGGTYIYYPDSVKGRFTISRDNAKNSLY
LQMNSLRAEDTAVYYCARLGGDNYYEYWGKGTTVTVSSDKTHTKPPKPAPELLGGPGTGDIVMTQSPDSLAVSLGERATI
NCRASKSVSTSGYSYMHWYQQKPGQPPKLLIYLVSNLESGVPDRFSGSGSGTDFTLTISSLQAEDVAVYYCQHIRELTRS
EFGGGTKVEIKRT
Humanized C8 single chain X4 (linker is IgG1 and IgG2 modified hinge region)
(DNA)
(SEQ ID NO: 254)
gaggtgcagctggtggagtctgggggaggcctggtcaagcctggggggtccctgagactctcctgtgcagcctctggattc
accttcagtggctatgccatgagctgggtccgccaggctccagggaaggggctggagtgggtctcaaccattagtagtggc
ggaacctacatatactacccagactcagtgaagggccgattcaccatctccagagacaacgccaagaactcactgtatctg
caaatgaacagcctgagagccgaggacacggccgtgtattactgtgcgagactgggcggcgacaattactatgagtattgg
ggcaaagggaccacggtcaccgtctcctccgataaaacccatactaaaccgccaaaaccggcgccggaactgctgggtggt
cctggtaccggtactggtggtccgactattaaacctccgaaacctccgaaacctgctccgaacctgctgggtggtccggac
atcgtgatgacccagtctccagactccctggctgtgtctctgggcgagagggccaccatcaactgcagggccagcaagagt
gttagcaccagcggctacagctacatgcactggtaccagcagaaaccaggacagcctcctaagctgctcatttacctggtg
tctaacctggaatccggggtccctgaccgattcagtggcagcgggtctgggacagatttcactctcaccatcagcagcctg
caggctgaagatgtggcagtttattactgtcaacacattcgggaactgaccaggagtgaattcggcggagggaccaaggtg
gagatcaaacgaact
(amino acids)
(SEQ ID NO: 255)
EVQLVESGGGLVKPGGSLRLSCAASGFTFSGYAMSWVRQAPGKGLEWVSTISSGGTYIYYPDSVKGRFTISRDNAKNSLY
LQMNSLRAEDTAVYYCARLGGDNYYEYWGKGTTVTVSSDKTHTKPPKPAPELLGGPGTGTGGPTIKPPKPPKPAPNLLGG
PDIVMTQSPDSLAVSLGERATINCRASKSVSTSGYSYMHWYQQKPGQPPKLLIYLVSNLESGVPDRFSGSGSGTDFTLTI
SSLQAEDVAVYYCQHIRELTRSEFGGGTKVEIKRT
pSECTag2 E6 scFV-FC
(DNA)
(SEQ ID NO: 256)
atggagacagacacactcctgctatgggtactgctgctctgggttccaggttccactggtgacgcggcccagccggccgag
gtgcagctggtggagtctgggggaggcctggtcaagcctggggggtccctgagactctcctgtgcagcctctggattcacc
ttcagtaggtatggcatgagctgggtccgccaggctccagggaagaggctggagtgggtctcaaccattagtggcggaggc
acctacatatactacccagactcagtgaagggccgattcaccatctccagagacaacgccaagaacaccctgtatctgcaa
atgaacagcctgagagccgaggacacggctgtgtattactgtaccagagataactatggccgcaactatgattatggcatg
gattattggggccagggcaccctggtgaccgtgagcagcggcggtggcggatccggcggtggcggatccggcggtggcgga
tccgaaattgtgttgacacagtctccagccaccctgtctttgtctccaggggaaagagccaccctcacctgcagcgccacc
agcagtgttagctacatccactggtaccaacagaggcctggccagagccccaggctcctcatctatagcacctccaacctg
gccagcggcatcccagccaggttcagtggcagtgggtctgggagcgactacactctcaccatcagcagcctagagcctgaa
gattttgcagtttattactgtcagcagcgtagcagctcccctttcacctttggcagcggcaccaaagtggaaattaaagag
cccaaatcttgtgacaaaactcacacatgcccaccgtgcccagcacctgaactcctggggggaccgtcagtcttcctcttc
cccccaaaacccaaggacaccctcatgatctcccggacccctgaggtcacatgcgtggtggtggacgtgagccacgaagac
cctgaggtcaagttcaactggtacgtggacggcgtggaggtgcataatgccaagacaaagccgcgggaggagcagtacaac
agcacgtaccgtgtggtcagcgtcctcaccgtcctgcaccaggactggctgaatggcaaggagtacaagtgcaaggtctcc
aacaaagccctcccagcccccatcgagaaaaccatctccaaagccaaagggcagccccgagaaccacaggtgtacaccctg
cccccatcccgggaggagatgaccaagaaccaggtcagcctgacctgcctggtcaaaggcttctatcccagcgacatcgcc
gtggagtgggagagcaatgggcagccggagaacaactacaagaccacgcctcccgtgctggactccgacggctccttcttc
ctctacagcaagctcaccgtggacaagagcaggtggcagcaggggaacgtcttctcatgctccgtgatgcatgaggctctg
cacaaccactacacgcagaagagcctctccctgtctccgggtaaatgataa
(amino acids)
(SEQ ID NO: 257)
METDTLLLWVLLLWVPGSTGDAAQPAEVQLVESGGGLVKPGGSLRLSCAASGFTFSRYGMSWVRQAPGKRLEWVSTISGG
GTYIYYPDSVKGRFTISRDNAKNTLYLQMNSLRAEDTAVYYCTRDNYGRNYDYGMDYWGQGTLVTVSSGGGGSGGGGSGG
GGSEIVLTQSPATLSLSPGERATLTCSATSSVSYIHWYQQRPGQSPRLLIYSTSNLASGIPARFSGSGSGSDYTLTISSL
EPEDFAVYYCQQRSSSPFTFGSGTKVEIKEPKSCDKTHTCPPCPAPELLGGPSVFLFPPKPKDTLMISRTPEVTCVVVDV
SHEDPEVKFNWYVDGVEVHNAKTKPREEQYNSTYRVVSVLTVLHQDWLNGKEYKCKVSNKALPAPIEKTISKAKGQPREP
QVYTLPPSREEMTKNQVSLTCLVKGFYPSDIAVEWESNGQPENNYKTTPPVLDSDGSFFLYSKLTVDKSRWQQGNVFSCS
VMHEALHNHYTQKSLSLSPGK**
E6 scFC-FC 1 gBLOCK sequence:
(SEQ ID NO: 258)
tgctctgggttccaggttccactggtgacgcggcccagccggccgaggtgcagctggtggagtctgggggaggcctggtca
agcctggggggtccctgagactctcctgtgcagcctctggattcaccttcagtaggtatggcatgagctgggtccgccagg
ctccagggaagaggctggagtgggtctcaaccattagtggcggaggcacctacatatactacccagactcagtgaagggcc
gattcaccatctccagagacaacgccaagaacaccctgtatctgcaaatgaacagcctgagagccgaggacacggctgtgt
attactgtaccagagataactatggccgcaactatgattatggcatggattattggggccagggcaccctggtgaccgtga
gcagcggcggtggcggatccggcggtggcggatccggcggtggcggatccgaaattgtgttgacacagtctccagccaccc
tgtctttgtc
E6 scFC-FC 2 gBLOCK sequence:
(SEQ ID NO: 259)
aattgtgttgacacagtctccagccaccctgtctttgtctccaggggaaagagccaccctcacctgcagcgccaccagcag
tgttagctacatccactggtaccaacagaggcctggccagagccccaggctcctcatctatagcacctccaacctggccag
cggcatcccagccaggttcagtggcagtgggtctgggagcgactacactctcaccatcagcagcctagagcctgaagattt
tgcagtttattactgtcagcagcgtagcagctcccctttcacctttggcagcggcaccaaagtggaaattaaagagcccaa
atcttgtgacaaaactcacacatgcccaccgtgcccagcacctgaactcctggggggaccgtcagtcttcctcttcccccc
aaaacccaaggacaccctcatgatctcccggacccctgaggtcacatgcgtggtggtggacgtgagccacgaagaccctga
ggtcaagttcaactggtacgtggacggcgtggaggtgcataatgccaagacaaagccgcgggaggagcagtacaacagcac
gtaccgtgtggtcagc
pSECTag2 C2 scFV-FC
(DNA)
(SEQ ID NO: 260)
atggagacagacacactcctgctatgggtactgctgctctgggttccaggttccactggtgacgcggcccagccggccgag
gtgcagctggtggagtctgggggaggcctggtcaagcctggggggtccctgagactctcctgtgcagcctctggattcacc
ttcagtggctatgccatgagctgggtccgccaggctccagggaaggggctggagtgggtctcaaccattagtagtggcgga
acctacatatactaccccgactcagtgaagggccgattcaccatctccagagacaacgccaagaactcactgtatctgcaa
atgaacagcctgagagccgaggacacggccgtgtattactgtgcgagacttgggggggataattactacgaatacttcgat
gtctggggcaaagggaccacggtcaccgtctcctccggcggtggcggatccggcggtggcggatccggcggtggcggatcc
gacattgtgctgacccagtctccagcctccttggccgtgtctccaggacagagggccaccatcacctgcagagccagtaag
agtgtcagtaccagcggatactcctacatgcactggtatcagcagaaaccaggacaacctcctaaactcctgatttacctg
gcatccaatctggagagcggggtcccagccaggttcagcggcagtgggtctgggaccgatttcaccctcacaattaatcct
gtggaagctaatgatactgcaaattattactgtcagcacagtagggagctgcctttcacattcggcggagggaccaaggtg
gagatcaaacgaactgagcccaaatcttgtgacaaaactcacacatgcccaccgtgcccagcacctgaactcctgggggga
ccgtcagtcttcctcttccccccaaaacccaaggacaccctcatgatctcccggacccctgaggtcacatgcgtggtggtg
gacgtgagccacgaagaccctgaggtcaagttcaactggtacgtggacggcgtggaggtgcataatgccaagacaaagccg
cgggaggagcagtacaacagcacgtaccgtgtggtcagcgtcctcaccgtcctgcaccaggactggctgaatggcaaggag
tacaagtgcaaggtctccaacaaagccctcccagcccccatcgagaaaaccatctccaaagccaaagggcagccccgagaa
ccacaggtgtacaccctgcccccatcccgggaggagatgaccaagaaccaggtcagcctgacctgcctggtcaaaggcttc
tatcccagcgacatcgccgtggagtgggagagcaatgggcagccggagaacaactacaagaccacgcctcccgtgctggac
tccgacggctccttcttcctctacagcaagctcaccgtggacaagagcaggtggcagcaggggaacgtcttctcatgctcc
gtgatgcatgaggctctgcacaaccactacacgcagaagagcctctccctgtctccgggtaaatgataa
(amino acids)
(SEQ ID NO: 261)
METDTLLLWVLLLWVPGSTGDAAQPAEVQLVESGGGLVKPGGSLRLSCAASGFTFSGYAMSWVRQAPGKGLEWVSTISSG
GTYIYYPDSVKGRFTISRDNAKNSLYLQMNSLRAEDTAVYYCARLGGDNYYEYFDVWGKGTTVTVSSGGGGSGGGGSGGG
GSDIVLTQSPASLAVSPGQRATITCRASKSVSTSGYSYMHWYQQKPGQPPKLLIYLASNLESGVPARFSGSGSGTDFTLT
INPVEANDTANYYCQHSRELPFTFGGGTKVEIKRTEPKSCDKTHTCPPCPAPELLGGPSVFLFPPKPKDTLMISRTPEVT
CVVVDVSHEDPEVKFNWYVDGVEVHNAKTKPREEQYNSTYRVVSVLTVLHQDWLNGKEYKCKVSNKALPAPIEKTISKAK
GQPREPQVYTLPPSREEMTKNQVSLTCLVKGFYPSDIAVEWESNGQPENNYKTTPPVLDSDGSFFLYSKLTVDKSRWQQG
NVFSCSVMHEALHNHYTQKSLSLSPGK**
C2 scFV-FC 1 gBLOCK sequence:
(DNA)
(SEQ ID NO: 262)
tgctctgggttccaggttccactggtgacgcggcccagccggccgaggtgcagctggtggagtctgggggaggcctggtca
agcctggggggtccctgagactctcctgtgcagcctctggattcaccttcagtggctatgccatgagctgggtccgccagg
ctccagggaaggggctggagtgggtctcaaccattagtagtggcggaacctacatatactaccccgactcagtgaagggcc
gattcaccatctccagagacaacgccaagaactcactgtatctgcaaatgaacagcctgagagccgaggacacggccgtgt
attactgtgcgagacttgggggggataattactacgaatacttcgatgtctggggcaaagggaccacggtcaccgtctcct
ccggcggtggcggatccggcggtggcggatccggcggtggcggatccgacattgtgctgacccagtctccagcctccttgg
c
C2 scFV-FC 2 gBLOCK sequence:
(DNA)
(SEQ ID NO: 263)
cattgtgctgacccagtctccagcctccttggccgtgtctccaggacagagggccaccatcacctgcagagccagtaagag
tgtcagtaccagcggatactcctacatgcactggtatcagcagaaaccaggacaacctcctaaactcctgatttacctggc
atccaatctggagagcggggtcccagccaggttcagcggcagtgggtctgggaccgatttcaccctcacaattaatcctgt
ggaagctaatgatactgcaaattattactgtcagcacagtagggagctgcctttcacattcggcggagggaccaaggtgga
gatcaaacgaactgagcccaaatcttgtgacaaaactcacacatgcccaccgtgcccagcacctgaactcctggggggacc
gtcagtcttcctcttccccccaaaacccaaggacaccctcatgatctcccggacccctgaggtcacatgcgtggtggtgga
cgtgagccacgaagaccctgaggtcaagttcaactggtacgtggacggcgtggaggtgcataatgccaagacaaagccgcg
ggaggagcagtacaacagcacgtaccgtgtggtcagc
pSECTag2 C3 scFV-FC
(DNA)
(SEQ ID NO: 264)
atggagacagacacactcctgctatgggtactgctgctctgggttccaggttccactggtgacgcggcccagccggcccag
gttcagctggtgcagtctggagctgaggtgaagaagcctggggcctcagtgaaggtctcctgcaaggcttctggttacacc
tttaccgactacgccatgaactgggtgcgacaggcccctggacaagggcttgagtggatgggagtgatcagcaccttcagc
ggtaacacaaacttcaaccagaagttcaagggcagagtcaccatgaccacagacacatccacgagcacagcctacatggag
ctgaggagcctgagatctgacgacacggccgtgtattactgtgcgagaagcgactactacggcccatacttcgactactgg
ggccagggcaccaccctgaccgtgtccagcggcggtggcggatccggcggtggcggatccggcggtggcggatccgatatt
gtgatgacccagactccactctctctgtccgtcacccctggacagccggcctccatctcctgcaggtctagtcagaccatt
gtccatagtaatggaaacacctatttggagtggtacctgcagaagccaggccagtctccacagctcctgatctataaggtt
tccaaccggttctctggagtgccagataggttcagtggcagcgggtcagggacagatttcacactgaaaatcagccgggtg
gaggctgaggatgttggggtttattactgcttccaaggtagccacgtgcctttcaccttcggcggagggaccaaggtggag
atcaaacgaactgagcccaaatcttgtgacaaaactcacacatgcccaccgtgcccagcacctgaactcctggggggaccg
tcagtcttcctcttccccccaaaacccaaggacaccctcatgatctcccggacccctgaggtcacatgcgtggtggtggac
gtgagccacgaagaccctgaggtcaagttcaactggtacgtggacggcgtggaggtgcataatgccaagacaaagccgcgg
gaggagcagtacaacagcacgtaccgtgtggtcagcgtcctcaccgtcctgcaccaggactggctgaatggcaaggagtac
aagtgcaaggtctccaacaaagccctcccagcccccatcgagaaaaccatctccaaagccaaagggcagccccgagaacca
caggtgtacaccctgcccccatcccgggaggagatgaccaagaaccaggtcagcctgacctgcctggtcaaaggcttctat
cccagcgacatcgccgtggagtgggagagcaatgggcagccggagaacaactacaagaccacgcctcccgtgctggactcc
gacggctccttcttcctctacagcaagctcaccgtggacaagagcaggtggcagcaggggaacgtcttctcatgctccgtg
atgcatgaggctctgcacaaccactacacgcagaagagcctctccctgtctccgggtaaatgataa
(amino acids)
(SEQ ID NO: 265)
METDTLLLWVLLLWVPGSTGDAAQPAQVQLVQSGAEVKKPGASVKVSCKASGYTFTDYAMNWVRQAPGQGLEWMGVISTF
SGNTNFNQKFKGRVTMTTDTSTSTAYMELRSLRSDDTAVYYCARSDYYGPYFDYWGQGTTLTVSSGGGGSGGGGSGGGGS
DIVMTQTPLSLSVTPGQPASISCRSSQTIVHSNGNTYLEWYLQKPGQSPQLLIYKVSNRFSGVPDRFSGSGSGTDFTLKI
SRVEAEDVGVYYCFQGSHVPFTFGGGTKVEIKRTEPKSCDKTHTCPPCPAPELLGGPSVFLFPPKPKDTLMISRTPEVTC
VVVDVSHEDPEVKFNWYVDGVEVHNAKTKPREEQYNSTYRVVSVLTVLHQDWLNGKEYKCKVSNKALPAPIEKTISKAKG
QPREPQVYTLPPSREEMTKNQVSLTCLVKGFYPSDIAVEWESNGQPENNYKTTPPVLDSDGSFFLYSKLTVDKSRWQQGN
VFSCSVMHEALHNHYTQKSLSLSPGK**
C3 GS scFV FC 1 gBLOCK sequence:
(DNA)
(SEQ ID NO: 266)
tgctctgggttccaggttccactggtgacgcggcccagccggcccaggttcagctggtgcagtctggagctgaggtgaaga
agcctggggcctcagtgaaggtctcctgcaaggcttctggttacacctttaccgactacgccatgaactgggtgcgacagg
cccctggacaagggcttgagtggatgggagtgatcagcaccttcagcggtaacacaaacttcaaccagaagttcaagggca
gagtcaccatgaccacagacacatccacgagcacagcctacatggagctgaggagcctgagatctgacgacacggccgtgt
attactgtgcgagaagcgactactacggcccatacttcgactactggggccagggcaccaccctgaccgtgtccagcggcg
gtggcggatccggcggtggcggatccggcggtggcggatccgatattgtgatgacccagactccactctctctgt
C3 scFV FC2 gBLOCK sequence:
(DNA)
(SEQ ID NO: 267)
tattgtgatgacccagactccactctctctgtccgtcacccctggacagccggcctccatctcctgcaggtctagtcagac
cattgtccatagtaatggaaacacctatttggagtggtacctgcagaagccaggccagtctccacagctcctgatctataa
ggtttccaaccggttctctggagtgccagataggttcagtggcagcgggtcagggacagatttcacactgaaaatcagccg
ggtggaggctgaggatgttggggtttattactgcttccaaggtagccacgtgcctttcaccttcggcggagggaccaaggt
ggagatcaaacgaactgagcccaaatcttgtgacaaaactcacacatgcccaccgtgcccagcacctgaactcctgggggg
accgtcagtcttcctcttccccccaaaacccaaggacaccctcatgatctcccggacccctgaggtcacatgcgtggtggt
ggacgtgagccacgaagaccctgaggtcaagttcaactggtacgtggacggcgtggaggtgcataatgccaagacaaagcc
gcgggaggagcagtacaacagcacgtaccgtgtggtcagc
pSECTag2 C8 scFV-FC
(DNA)
(SEQ ID NO: 268)
atggagacagacacactcctgctatgggtactgctgctctgggttccaggttccactggtgacgcggcccagccggccgag
gtgcagctggtggagtctgggggaggcctggtcaagcctggggggtccctgagactctcctgtgcagcctctggattcacc
ttcagtggctatgccatgagctgggtccgccaggctccagggaaggggctggagtgggtctcaaccattagtagtggcgga
acctacatatactaccctgactcagtgaagggccgattcaccatctccagagacaacgccaagaactcactgtatctgcaa
atgaacagcctgagagccgaggacacggccgtgtattactgtgcgagactgggcggcgataactattatgaatattggggc
aaagggaccacggtcaccgtctcctccggcggtggcggatccggcggtggcggatccggcggtggcggatccgacatcgtg
atgacccagtctccagactccctggctgtgtctctgggcgagagggccaccatcaactgcagggccagcaagagtgttagc
accagcggctacagctacatgcactggtaccagcagaaaccaggacagcctcctaagctgctcatttacctggtgtctaac
ctggaatccggggtccctgaccgattcagtggcagcgggtctgggacagatttcactctcaccatcagcagcctgcaggct
gaagatgtggcagtttattactgtcaacacattcgggaactgaccaggagtgaattcggcggagggaccaaggtggagatc
aaacgaactgagcccaaatcttgtgacaaaactcacacatgcccaccgtgcccagcacctgaactcctggggggaccgtca
gtcttcctcttccccccaaaacccaaggacaccctcatgatctcccggacccctgaggtcacatgcgtggtggtggacgtg
agccacgaagaccctgaggtcaagttcaactggtacgtggacggcgtggaggtgcataatgccaagacaaagccgcgggag
gagcagtacaacagcacgtaccgtgtggtcagcgtcctcaccgtcctgcaccaggactggctgaatggcaaggagtacaag
tgcaaggtctccaacaaagccctcccagcccccatcgagaaaaccatctccaaagccaaagggcagccccgagaaccacag
gtgtacaccctgcccccatcccgggaggagatgaccaagaaccaggtcagcctgacctgcctggtcaaaggcttctatccc
agcgacatcgccgtggagtgggagagcaatgggcagccggagaacaactacaagaccacgcctcccgtgctggactccgac
ggctccttcttcctctacagcaagctcaccgtggacaagagcaggtggcagcaggggaacgtcttctcatgctccgtgatg
catgaggctctgcacaaccactacacgcagaagagcctctccctgtctccgggtaaatgataa
(amino acids)
(SEQ ID NO: 269)
METDTLLLWVLLLWVPGSTGDAAQPAEVQLVESGGGLVKPGGSLRLSCAASGFTFSGYAMSWVRQAPGKGLEWVSTISSG
GTYIYYPDSVKGRFTISRDNAKNSLYLQMNSLRAEDTAVYYCARLGGDNYYEYWGKGTTVTVSSGGGGSGGGGSGGGGSD
IVMTQSPDSLAVSLGERATINCRASKSVSTSGYSYMHWYQQKPGQPPKLLIYLVSNLESGVPDRESGSGSGTDFTLTISS
LQAEDVAVYYCQHIRELTRSEFGGGTKVEIKRTEPKSCDKTHTCPPCPAPELLGGPSVFLFPPKPKDTLMISRTPEVTCV
VVDVSHEDPEVKFNWYVDGVEVHNAKTKPREEQYNSTYRVVSVLTVLHQDWLNGKEYKCKVSNKALPAPIEKTISKAKGQ
PREPQVYTLPPSREEMTKNQVSLTCLVKGFYPSDIAVEWESNGQPENNYKTTPPVLDSDGSFFLYSKLTVDKSRWQQGNV
FSCSVMHEALHNHYTQKSLSLSPGK**
C8 scFV FC 1 gBLOCK sequence:
(DNA)
(SEQ ID NO: 270)
tgctctgggttccaggttccactggtgacgcggcccagccggccgaggtgcagctggtggagtctgggggaggcctggtca
agcctggggggtccctgagactctcctgtgcagcctctggattcaccttcagtggctatgccatgagctgggtccgccagg
ctccagggaaggggctggagtgggtctcaaccattagtagtggcggaacctacatatactaccctgactcagtgaagggcc
gattcaccatctccagagacaacgccaagaactcactgtatctgcaaatgaacagcctgagagccgaggacacggccgtgt
attactgtgcgagactgggcggcgataactattatgaatattggggcaaagggaccacggtcaccgtctcctccggcggtg
gcggatccggcggtggcggatccggcggtggcggatccgacatcgtgatgacccagtctccagactccctgg
C8 scFV FC2 gBLOCK sequence:
(DNA)
(SEQ ID NO: 271)
catcgtgatgacccagtctccagactccctggctgtgtctctgggcgagagggccaccatcaactgcagggccagcaagag
tgttagcaccagcggctacagctacatgcactggtaccagcagaaaccaggacagcctcctaagctgctcatttacctggt
gtctaacctggaatccggggtccctgaccgattcagtggcagcgggtctgggacagatttcactctcaccatcagcagcct
gcaggctgaagatgtggcagtttattactgtcaacacattcgggaactgaccaggagtgaattcggcggagggaccaaggt
ggagatcaaacgaactgagcccaaatcttgtgacaaaactcacacatgcccaccgtgcccagcacctgaactcctgggggg
accgtcagtcttcctcttccccccaaaacccaaggacaccctcatgatctcccggacccctgaggtcacatgcgtggtggt
ggacgtgagccacgaagaccctgaggtcaagttcaactggtacgtggacggcgtggaggtgcataatgccaagacaaagcc
gcgggaggagcagtacaacagcacgtaccgtgtggtcagc
Human IgG1 Fc sequence:
(DNA)
(SEQ ID NO: 272)
gagcccaaatcttgtgacaaaactcacacatgcccaccgtgcccagcacctgaactcctggggggaccgtcagtcttcctc
ttccccccaaaacccaaggacaccctcatgatctcccggacccctgaggtcacatgcgtggtggtggacgtgagccacgaa
gaccctgaggtcaagttcaactggtacgtggacggcgtggaggtgcataatgccaagacaaagccgcgggaggagcagtac
aacagcacgtaccgtgtggtcagcgtcctcaccgtcctgcaccaggactggctgaatggcaaggagtacaagtgcaaggtc
tccaacaaagccctcccagcccccatcgagaaaaccatctccaaagccaaagggcagccccgagaaccacaggtgtacacc
ctgcccccatcccgggaggagatgaccaagaaccaggtcagcctgacctgcctggtcaaaggcttctatcccagcgacatc
gccgtggagtgggagagcaatgggcagccggagaacaactacaagaccacgcctcccgtgctggactccgacggctccttc
ttcctctacagcaagctcaccgtggacaagagcaggtggcagcaggggaacgtcttctcatgctccgtgatgcatgaggct
ctgcacaaccactacacgcagaagagcctctccctgtctccgggtaaatgataa
(amino acids)
(SEQ ID NO: 273)
EPKSCDKTHTCPPCPAPELLGGPSVFLFPPKPKDTLMISRTPEVTCVVVDVSHEDPEVKENWYVDGVEVHNAKTKPREEQ
YNSTYRVVSVLTVLHQDWLNGKEYKCKVSNKALPAPIEKTISKAKGQPREPQVYTLPPSREEMTKNQVSLTCLVKGFYPS
DIAVEWESNGQPENNYKTTPPVLDSDGSFFLYSKLTVDKSRWQQGNVFSCSVMHEALHNHYTQKSLSLSPGK**
Human IgG1 CH2-CH3 domain sequence:
(DNA)
(SEQ ID NO: 274)
ccgtgcccagcacctgaactcctggggggaccgtcagtcttcctcttccccccaaaacccaaggacaccctcatgatctcc
cggacccctgaggtcacatgcgtggtggtggacgtgagccacgaagaccctgaggtcaagttcaactggtacgtggacggc
gtggaggtgcataatgccaagacaaagccgcgggaggagcagtacaacagcacgtaccgtgtggtcagcgtcctcaccgtc
ctgcaccaggactggctgaatggcaaggagtacaagtgcaaggtctccaacaaagccctcccagcccccatcgagaaaacc
atctccaaagccaaagggcagccccgagaaccacaggtgtacaccctgcccccatcccgggaggagatgaccaagaaccag
gtcagcctgacctgcctggtcaaaggcttctatcccagcgacatcgccgtggagtgggagagcaatgggcagccggagaac
aactacaagaccacgcctcccgtgctggactccgacggctccttcttcctctacagcaagctcaccgtggacaagagcagg
tggcagcaggggaacgtcttctcatgctccgtgatgcatgaggctctgcacaaccactacacgcagaagagcctctccctg
tctccgggtaaatgataa
(amino acids)
(SEQ ID NO: 275)
PCPAPELLGGPSVFLFPPKPKDTLMISRTPEVTCVVVDVSHEDPEVKFNWYVDGVEVHNAKTKPREEQYNSTYRVVSVLT
VLHQDWLNGKEYKCKVSNKALPAPIEKTISKAKGQPREPQVYTLPPSREEMTKNQVSLTCLVKGFYPSDIAVEWESNGQP
ENNYKTTPPVLDSDGSFFLYSKLTVDKSRWQQGNVFSCSVMHEALHNHYTQKSLSLSPGK**
Human IgG1 CH3 domain sequence:
(DNA)
(SEQ ID NO: 276)
gggcagccccgagaaccacaggtgtacaccctgcccccatcccgggaggagatgaccaagaaccaggtcagcctgacctgc
ctggtcaaaggcttctatcccagcgacatcgccgtggagtgggagagcaatgggcagccggagaacaactacaagaccacg
cctcccgtgctggactccgacggctccttcttcctctacagcaagctcaccgtggacaagagcaggtggcagcaggggaac
gtcttctcatgctccgtgatgcatgaggctctgcacaaccactacacgcagaagagcctctccctgtctccgggtaaatga
taa
(amino acids)
(SEQ ID NO: 277)
GQPREPQVYTLPPSREEMTKNQVSLTCLVKGFYPSDIAVEWESNGQPENNYKTTPPVLDSDGSFFLYSKLTVDKSRWQQG
NVFSCSVMHEALHNHYTQKSLSLSPGK**
Human IgG1 Fc Y407R sequence:
(DNA)
(SEQ ID NO: 278)
gagcccaaatcttgtgacaaaactcacacatgcccaccgtgcccagcacctgaactcctggggggaccgtcagtcttcctc
ttccccccaaaacccaaggacaccctcatgatctcccggacccctgaggtcacatgcgtggtggtggacgtgagccacgaa
gaccctgaggtcaagttcaactggtacgtggacggcgtggaggtgcataatgccaagacaaagccgcgggaggagcagtac
aacagcacgtaccgtgtggtcagcgtcctcaccgtcctgcaccaggactggctgaatggcaaggagtacaagtgcaaggtc
tccaacaaagccctcccagcccccatcgagaaaaccatctccaaagccaaagggcagccccgagaaccacaggtgtacacc
ctgcccccatcccgggaggagatgaccaagaaccaggtcagcctgacctgcctggtcaaaggcttctatcccagcgacatc
gccgtggagtgggagagcaatgggcagccggagaacaactacaagaccacgcctcccgtgctggactccgacggctccttc
ttcctcaggagcaagctcaccgtggacaagagcaggtggcagcaggggaacgtcttctcatgctccgtgatgcatgaggct
ctgcacaaccactacacgcagaagagcctctccctgtctccgggtaaatgataa
(amino acids)
(SEQ ID NO: 279)
EPKSCDKTHTCPPCPAPELLGGPSVFLFPPKPKDTLMISRTPEVTCVVVDVSHEDPEVKENWYVDGVEVHNAKTKPREEQ
YNSTYRVVSVLTVLHQDWLNGKEYKCKVSNKALPAPIEKTISKAKGQPREPQVYTLPPSREEMTKNQVSLTCLVKGFYPS
DIAVEWESNGQPENNYKTTPPVLDSDGSFFLRSKLTVDKSRWQQGNVFSCSVMHEALHNHYTQKSLSLSPGK**
Human IgG1 Fc F4050 sequence:
(DNA)
(SEQ ID NO: 280)
gagcccaaatcttgtgacaaaactcacacatgcccaccgtgcccagcacctgaactcctggggggaccgtcagtcttcctc
ttccccccaaaacccaaggacaccctcatgatctcccggacccctgaggtcacatgcgtggtggtggacgtgagccacgaa
gaccctgaggtcaagttcaactggtacgtggacggcgtggaggtgcataatgccaagacaaagccgcgggaggagcagtac
aacagcacgtaccgtgtggtcagcgtcctcaccgtcctgcaccaggactggctgaatggcaaggagtacaagtgcaaggtc
tccaacaaagccctcccagcccccatcgagaaaaccatctccaaagccaaagggcagccccgagaaccacaggtgtacacc
ctgcccccatcccgggaggagatgaccaagaaccaggtcagcctgacctgcctggtcaaaggcttctatcccagcgacatc
gccgtggagtgggagagcaatgggcagccggagaacaactacaagaccacgcctcccgtgctggactccgacggctccttc
cagctctacagcaagctcaccgtggacaagagcaggtggcagcaggggaacgtcttctcatgctccgtgatgcatgaggct
ctgcacaaccactacacgcagaagagcctctccctgtctccgggtaaatgataa
(amino acids)
(SEQ ID NO: 281)
EPKSCDKTHTCPPCPAPELLGGPSVFLFPPKPKDTLMISRTPEVTCVVVDVSHEDPEVKENWYVDGVEVHNAKTKPREEQ
YNSTYRVVSVLTVLHQDWLNGKEYKCKVSNKALPAPIEKTISKAKGQPREPQVYTLPPSREEMTKNQVSLTCLVKGFYPS
DIAVEWESNGQPENNYKTTPPVLDSDGSFQLYSKLTVDKSRWQQGNVFSCSVMHEALHNHYTQKSLSLSPGK**
Human IgG1 Fc T394D sequence:
(DNA)
(SEQ ID NO: 282)
gagcccaaatcttgtgacaaaactcacacatgcccaccgtgcccagcacctgaactcctggggggaccgtcagtcttcctc
ttccccccaaaacccaaggacaccctcatgatctcccggacccctgaggtcacatgcgtggtggtggacgtgagccacgaa
gaccctgaggtcaagttcaactggtacgtggacggcgtggaggtgcataatgccaagacaaagccgcgggaggagcagtac
aacagcacgtaccgtgtggtcagcgtcctcaccgtcctgcaccaggactggctgaatggcaaggagtacaagtgcaaggtc
tccaacaaagccctcccagcccccatcgagaaaaccatctccaaagccaaagggcagccccgagaaccacaggtgtacacc
ctgcccccatcccgggaggagatgaccaagaaccaggtcagcctgacctgcctggtcaaaggcttctatcccagcgacatc
gccgtggagtgggagagcaatgggcagccggagaacaactacaagaccgaccccccgtgctggactccgacggctccttc
ttcctctacagcaagctcaccgtggacaagagcaggtggcagcaggggaacgtcttctcatgctccgtgatgcatgaggct
ctgcacaaccactacacgcagaagagcctctccctgtctccgggtaaatgataa
(amino acids)
(SEQ ID NO: 283)
EPKSCDKTHTCPPCPAPELLGGPSVFLFPPKPKDTLMISRTPEVTCVVVDVSHEDPEVKENWYVDGVEVHNAKTKPREEQ
YNSTYRVVSVLTVLHQDWLNGKEYKCKVSNKALPAPIEKTISKAKGQPREPQVYTLPPSREEMTKNQVSLTCLVKGFYPS
DIAVEWESNGQPENNYKTDPPVLDSDGSFFLYSKLTVDKSRWQQGNVFSCSVMHEALHNHYTQKSLSLSPGK**
Human IgG1 Fc T366W/L368W sequence:
(DNA)
(SEQ ID NO: 284)
gagcccaaatcttgtgacaaaactcacacatgcccaccgtgcccagcacctgaactcctggggggaccgtcagtcttcctc
ttccccccaaaacccaaggacaccctcatgatctcccggacccctgaggtcacatgcgtggtggtggacgtgagccacgaa
gaccctgaggtcaagttcaactggtacgtggacggcgtggaggtgcataatgccaagacaaagccgcgggaggagcagtac
aacagcacgtaccgtgtggtcagcgtcctcaccgtcctgcaccaggactggctgaatggcaaggagtacaagtgcaaggtc
tccaacaaagccctcccagcccccatcgagaaaaccatctccaaagccaaagggcagccccgagaaccacaggtgtacacc
ctgcccccatcccgggaggagatgaccaagaaccaggtcagcctgtggtgctgggtcaaaggcttctatcccagcgacatc
gccgtggagtgggagagcaatgggcagccggagaacaactacaagaccacgcctcccgtgctggactccgacggctccttc
ttcctctacagcaagctcaccgtggacaagagcaggtggcagcaggggaacgtcttctcatgctccgtgatgcatgaggct
ctgcacaaccactacacgcagaagagcctctccctgtctccgggtaaatgataa
(amino acids)
(SEQ ID NO: 285)
EPKSCDKTHTCPPCPAPELLGGPSVFLFPPKPKDTLMISRTPEVTCVVVDVSHEDPEVKENWYVDGVEVHNAKTKPREEQ
YNSTYRVVSVLTVLHQDWLNGKEYKCKVSNKALPAPIEKTISKAKGQPREPQVYTLPPSREEMTKNQVSLWCWVKGFYPS
DIAVEWESNGQPENNYKTTPPVLDSDGSFFLYSKLTVDKSRWQQGNVFSCSVMHEALHNHYTQKSLSLSPGK**
Human IgG1 Fc T364R/L368R sequence:
(DNA)
(SEQ ID NO: 286)
gagcccaaatcttgtgacaaaactcacacatgcccaccgtgcccagcacctgaactcctggggggaccgtcagtcttcctc
ttccccccaaaacccaaggacaccctcatgatctcccggacccctgaggtcacatgcgtggtggtggacgtgagccacgaa
gaccctgaggtcaagttcaactggtacgtggacggcgtggaggtgcataatgccaagacaaagccgcgggaggagcagtac
aacagcacgtaccgtgtggtcagcgtcctcaccgtcctgcaccaggactggctgaatggcaaggagtacaagtgcaaggtc
tccaacaaagccctcccagcccccatcgagaaaaccatctccaaagccaaagggcagccccgagaaccacaggtgtacacc
ctgcccccatcccgggaggagatgaccaagaaccaggtcaggctgacctgcagggtcaaaggcttctatcccagcgacatc
gccgtggagtgggagagcaatgggcagccggagaacaactacaagaccacgcctcccgtgctggactccgacggctccttc
ttcctctacagcaagctcaccgtggacaagagcaggtggcagcaggggaacgtcttctcatgctccgtgatgcatgaggct
ctgcacaaccactacacgcagaagagcctctccctgtctccgggtaaatgataa
(amino acids)
(SEQ ID NO: 287)
EPKSCDKTHTCPPCPAPELLGGPSVFLFPPKPKDTLMISRTPEVTCVVVDVSHEDPEVKENWYVDGVEVHNAKTKPREEQ
YNSTYRVVSVLTVLHQDWLNGKEYKCKVSNKALPAPIEKTISKAKGQPREPQVYTLPPSREEMTKNQVRLTCRVKGFYPS
DIAVEWESNGQPENNYKTTPPVLDSDGSFFLYSKLTVDKSRWQQGNVFSCSVMHEALHNHYTQKSLSLSPGK**
Human IgG1 Fc hingeless sequence:
(DNA)
(SEQ ID NO: 288)
gcacctgaactcctggggggaccgtcagtcttcctcttccccccaaaacccaaggacaccctcatgatctcccggacccct
gaggtcacatgcgtggtggtggacgtgagccacgaagaccctgaggtcaagttcaactggtacgtggacggcgtggaggtg
cataatgccaagacaaagccgcgggaggagcagtacaacagcacgtaccgtgtggtcagcgtcctcaccgtcctgcaccag
gactggctgaatggcaaggagtacaagtgcaaggtctccaacaaagccctcccagcccccatcgagaaaaccatctccaaa
gccaaagggcagccccgagaaccacaggtgtacaccctgcccccatcccgggaggagatgaccaagaaccaggtcagcctg
acctgcctggtcaaaggcttctatcccagcgacatcgccgtggagtgggagagcaatgggcagccggagaacaactacaag
accacgcctcccgtgctggactccgacggctccttcttcctctacagcaagctcaccgtggacaagagcaggtggcagcag
gggaacgtcttctcatgctccgtgatgcatgaggctctgcacaaccactacacgcagaagagcctctccctgtctccgggt
aaatgataa
(amino acids)
(SEQ ID NO: 289)
APELLGGPSVFLFPPKPKDTLMISRTPEVTCVVVDVSHEDPEVKFNWYVDGVEVHNAKTKPREEQYNSTYRVVSVLTVLH
QDWLNGKEYKCKVSNKALPAPIEKTISKAKGQPREPQVYTLPPSREEMTKNQVSLTCLVKGFYPSDIAVEWESNGQPENN
YKTTPPVLDSDGSFFLYSKLTVDKSRWQQGNVFSCSVMHEALHNHYTQKSLSLSPGK**
Human IgG1 G237A FC sequence:
(DNA)
(SEQ ID NO: 290)
gagcccaaatcttgtgacaaaactcacacatgcccaccgtgcccagcacctgaactcctgggggccccgtcagtcttcctc
ttccccccaaaacccaaggacaccctcatgatctcccggacccctgaggtcacatgcgtggtggtggacgtgagccacgaa
gaccctgaggtcaagttcaactggtacgtggacggcgtggaggtgcataatgccaagacaaagccgcgggaggagcagtac
aacagcacgtaccgtgtggtcagcgtcctcaccgtcctgcaccaggactggctgaatggcaaggagtacaagtgcaaggtc
tccaacaaagccctcccagcccccatcgagaaaaccatctccaaagccaaagggcagccccgagaaccacaggtgtacacc
ctgcccccatcccgggaggagatgaccaagaaccaggtcagcctgacctgcctggtcaaaggcttctatcccagcgacatc
gccgtggagtgggagagcaatgggcagccggagaacaactacaagaccacgcctcccgtgctggactccgacggctccttc
ttcctctacagcaagctcaccgtggacaagagcaggtggcagcaggggaacgtcttctcatgctccgtgatgcatgaggct
ctgcacaaccactacacgcagaagagcctctccctgtctccgggtaaa
(amino acids)
(SEQ ID NO: 291)
EPKSCDKTHTCPPCPAPELLGAPSVFLFPPKPKDTLMISRTPEVTCVVVDVSHEDPEVKENWYVDGVEVHNAKTKPREEQY
NSTYRVVSVLTVLHQDWLNGKEYKCKVSNKALPAPIEKTISKAKGQPREPQVYTLPPSREEMTKNQVSLTCLVKGFYPSDI
AVEWESNGQPENNYKTTPPVLDSDGSFFLYSKLTVDKSRWQQGNVFSCSVMHEALHNHYTQKSLSLSPGK
Human IgG1 L234A/L235A FC sequence:
(DNA)
(SEQ ID NO: 292)
gagcccaaatcttgtgacaaaactcacacatgcccaccgtgcccagcacctgaagccgccgggggaccgtcagtcttcctc
ttccccccaaaacccaaggacaccctcatgatctcccggacccctgaggtcacatgcgtggtggtggacgtgagccacgaa
gaccctgaggtcaagttcaactggtacgtggacggcgtggaggtgcataatgccaagacaaagccgcgggaggagcagtac
aacagcacgtaccgtgtggtcagcgtcctcaccgtcctgcaccaggactggctgaatggcaaggagtacaagtgcaaggtc
tccaacaaagccctcccagcccccatcgagaaaaccatctccaaagccaaagggcagccccgagaaccacaggtgtacacc
ctgcccccatcccgggaggagatgaccaagaaccaggtcagcctgacctgcctggtcaaaggcttctatcccagcgacatc
gccgtggagtgggagagcaatgggcagccggagaacaactacaagaccacgcctcccgtgctggactccgacggctccttc
ttcctctacagcaagctcaccgtggacaagagcaggtggcagcaggggaacgtcttctcatgctccgtgatgcatgaggct
ctgcacaaccactacacgcagaagagcctctccctgtctccgggtaaa
(amino acids)
(SEQ ID NO: 293)
EPKSCDKTHTCPPCPAPEAAGGPSVFLFPPKPKDTLMISRTPEVTCVVVDVSHEDPEVKFNWYVDGVEVHNAKTKPREEQY
NSTYRVVSVLTVLHQDWLNGKEYKCKVSNKALPAPIEKTISKAKGQPREPQVYTLPPSREEMTKNQVSLTCLVKGFYPSDI
AVEWESNGQPENNYKTTPPVLDSDGSFFLYSKLTVDKSRWQQGNVFSCSVMHEALHNHYTQKSLSLSPGK
CAR-T E6 CD8/CD8/CD3z sequence:
N-CD8ls-huMNE6scFv-CD8ecd fragment-CD8 transmembrane-CD3zeta-C
(DNA)
(SEQ ID NO: 294)
atggccctgcccgtgaccgctttgctgctccccctggcgctgctgctgcacgccgccaggccagaggtccagctggttgag
agtggcggtgggctggttaagcctggcggctccctgcggctgagctgcgccgcgagtggatttactttcagccgatatggg
atgagttgggtgcggcaagctcccgggaagaggctggaatgggtctcaacaatctccggggggggcacttacatctattac
cccgactcagtcaaggggagatttaccatttcacgagacaacgctaagaataccctgtatttgcagatgaattctctgaga
gcagaggacacagctgtttactattgtacccgcgacaactatggcaggaactacgactacggtatggactattggggacaa
gggacattggttacagtgagcagtggcggcgggggcagcggaggaggaggcagcggtggggggggcagcgagatagtgctc
acgcagtcacccgcgactctcagtctctcacctggggaacgagctaccctgacgtgctctgctacctcctcagtgtcatat
attcactggtatcagcaacggcccgggcagtcccctagattgctcatttatagtacctctaatctggcctcaggtatccct
gcacgattttctggatctggttcaggttctgattacaccctcactatctctagcctggagcctgaagactttgccgtttat
tactgccagcagaggtctagctccccattcacctttgggagtgggaccaaggttgaaattaaaacgacaaccccggccccc
agaccaccaacgccagcccccaccatcgccagccaacccctgtctctgagaccagaagcctgtaggcctgccgccggtgga
gctgtgcacacaagaggactggatttcgcctgtgatatctacatttgggccccgctcgcaggcacatgtggagtgctcctc
ctctccctggtgattaccctgtactgccgcgttaagttctcccgatcagccgacgcgcctgcttacaagcagggccagaac
caactgtacaacgagctgaatctcggtagacgggaagagtacgacgtgttggacaaacggagaggccgcgacccagaaatg
ggcggcaagcctcgcaggaaaaacccccaggagggactgtacaatgagttgcagaaagataagatggcagaagcttatagc
gagatcggaatgaagggggaaaggagacgagggaaaggacacgacggcctttatcagggcctgtccacagcaacaaaagat
acgtatgacgccctccatatgcaggcacttccaccacggtgataa
(amino acids)
(SEQ ID NO: 295)
MALPVTALLLPLALLLHAARPEVQLVESGGGLVKPGGSLRLSCAASGFTFSRYGMSWVRQAPGKRLEWVSTISGGGTYIY
YPDSVKGRFTISRDNAKNTLYLQMNSLRAEDTAVYYCTRDNYGRNYDYGMDYWGQGTLVTVSSGGGGSGGGGSGGGGSEI
VLTQSPATLSLSPGERATLTCSATSSVSYIHWYQQRPGQSPRLLIYSTSNLASGIPARFSGSGSGSDYTLTISSLEPEDF
AVYYCQQRSSSPFTFGSGTKVEIKTTTPAPRPPTPAPTIASQPLSLRPEACRPAAGGAVHTRGLDFACDIYIWAPLAGTC
GVLLLSLVITLYCRVKFSRSADAPAYKQGQNQLYNELNLGRREEYDVLDKRRGRDPEMGGKPRRKNPQEGLYNELQKDKM
AEAYSEIGMKGERRRGKGHDGLYQGLSTATKDTYDALHMQALPPR**
**
CAR-T E6 CD3z gBLOCK sequence:
(DNA)
(SEQ ID NO: 296)
tggagctgtgcacacaagaggactggatttcgcctgtgatatctacatttgggccccgctcgcaggcacatgtggagtgct
cctcctctccctggtgattaccctgtactgccgcgttaagttctcccgatcagccgacgcgcctgcttacaagcagggcca
gaaccaactgtacaacgagctgaatctcggtagacgggaagagtacgacgtgttggacaaacggagaggccgcgacccaga
aatgggcggcaagcctcgcaggaaaaacccccaggagggactgtacaatgagttgcagaaagataagatggcagaagctta
tagcgagatcggaatgaagggggaaaggagacgagggaaaggacacgacggcctttatcagggcctgtccacagcaacaaa
agatacgtatgacgccctccatatgcaggcacttccaccacggtgataagtttaaacccgctgatcagcctcgactgtgc
CAR-T E6 CD8/CD8/CD28/CD3z sequence:
N-CD8ls-huMNE6scFv-CD8ecd fragment-CD8 transmembrane-CD28-CD3zeta-C
(DNA)
(SEQ ID NO: 297)
atggccctgcccgtgaccgctttgctgctccccctggcgctgctgctgcacgccgccaggccagaggtccagctggttgag
agtggcggtgggctggttaagcctggcggctccctgcggctgagctgcgccgcgagtggatttactttcagccgatatggg
atgagttgggtgcggcaagctcccgggaagaggctggaatgggtctcaacaatctccggggggggcacttacatctattac
cccgactcagtcaaggggagatttaccatttcacgagacaacgctaagaataccctgtatttgcagatgaattctctgaga
gcagaggacacagctgtttactattgtacccgcgacaactatggcaggaactacgactacggtatggactattggggacaa
gggacattggttacagtgagcagtggcggcgggggcagcggaggaggaggcagcggtggggggggcagcgagatagtgctc
acgcagtcacccgcgactctcagtctctcacctggggaacgagctaccctgacgtgctctgctacctcctcagtgtcatat
attcactggtatcagcaacggcccgggcagtcccctagattgctcatttatagtacctctaatctggcctcaggtatccct
gcacgattttctggatctggttcaggttctgattacaccctcactatctctagcctggagcctgaagactttgccgtttat
tactgccagcagaggtctagctccccattcacctttgggagtgggaccaaggttgaaattaaaacgacaaccccggccccc
agaccaccaacgccagcccccaccatcgccagccaacccctgtctctgagaccagaagcctgtaggcctgccgccggtgga
gctgtgcacacaagaggactggatttcgcctgtgatatctacatttgggccccgctcgcaggcacatgtggagtgctcctc
ctctccctggtgattaccctgtactgcagaagcaagcggtctcggctcctgcattctgattacatgaacatgaccccaaga
agaccaggccccaccaggaaacattaccagccctacgctccgccacgcgacttcgctgcctaccggtcccgcgttaagttc
tcccgatcagccgacgcgcctgcttacaagcagggccagaaccaactgtacaacgagctgaatctcggtagacgggaagag
tacgacgtgttggacaaacggagaggccgcgacccagaaatgggcggcaagcctcgcaggaaaaacccccaggagggactg
tacaatgagttgcagaaagataagatggcagaagcttatagcgagatcggaatgaagggggaaaggagacgagggaaagga
cacgacggcctttatcagggcctgtccacagcaacaaaagatacgtatgacgccctccatatgcaggcacttccaccacgg
tgataa
(amino acids)
(SEQ ID NO: 298)
MALPVTALLLPLALLLHAARPEVQLVESGGGLVKPGGSLRLSCAASGFTFSRYGMSWVRQAPGKRLEWVSTISGGGTYIY
YPDSVKGRFTISRDNAKNTLYLQMNSLRAEDTAVYYCTRDNYGRNYDYGMDYWGQGTLVTVSSGGGGSGGGGSGGGGSEI
VLTQSPATLSLSPGERATLTCSATSSVSYIHWYQQRPGQSPRLLIYSTSNLASGIPARFSGSGSGSDYTLTISSLEPEDF
AVYYCQQRSSSPFTFGSGTKVEIKTTTPAPRPPTPAPTIASQPLSLRPEACRPAAGGAVHTRGLDFACDIYIWAPLAGTC
GVLLLSLVITLYCRSKRSRLLHSDYMNMTPRRPGPTRKHYQPYAPPRDFAAYRSRVKFSRSADAPAYKQGQNQLYNELNL
GRREEYDVLDKRRGRDPEMGGKPRRKNPQEGLYNELQKDKMAEAYSEIGMKGERRRGKGHDGLYQGLSTATKDTYDALHM
QALPPR**
CAR-T E6 CD28/CD3z g BLOCK sequence:
(DNA)
(SEQ ID NO: 299)
tggagctgtgcacacaagaggactggatttcgcctgtgatatctacatttgggccccgctcgcaggcacatgtggagtgct
cctcctctccctggtgattaccctgtactgcagaagcaagcggtctcggctcctgcattctgattacatgaacatgacccc
aagaagaccaggccccaccaggaaacattaccagccctacgctccgccacgcgacttcgctgcctaccggtcccgcgttaa
gttctcccgatcagccgacgcgcctgcttacaagcagggccagaaccaactgtacaacgagctgaatctcggtagacggga
agagtacgacgtgttggacaaacggagaggccgcgacccagaaatgggcggcaagcctcgcaggaaaaacccccaggaggg
actgtacaatgagttgcagaaagataagatggcagaagcttatagcgagatcggaatgaagggggaaaggagacgagggaa
aggacacgacggcctttatcagggcctgtccacagcaacaaaagatacgtatgacgccctccatatgcaggcacttccacc
acggtgataagtttaaacccgctgatcagcctcgactgtgc
CAR-T E6 CD8/CD8/4-1BB/CD3z sequence:
N-CD8ls-huMNE6scFv-CD8ecd fragment-CD8 transmembrane-4-1BB-CD3zeta-C
(DNA)
(SEQ ID NO: 300)
atggccctgcccgtgaccgctttgctgctccccctggcgctgctgctgcacgccgccaggccagaggtccagctggttgag
agtggcggtgggctggttaagcctggcggctccctgcggctgagctgcgccgcgagtggatttactttcagccgatatggg
atgagttgggtgcggcaagctcccgggaagaggctggaatgggtctcaacaatctccggggggggcacttacatctattac
cccgactcagtcaaggggagatttaccatttcacgagacaacgctaagaataccctgtatttgcagatgaattctctgaga
gcagaggacacagctgtttactattgtacccgcgacaactatggcaggaactacgactacggtatggactattggggacaa
gggacattggttacagtgagcagtggcggcgggggcagcggaggaggaggcagcggtggggggggcagcgagatagtgctc
acgcagtcacccgcgactctcagtctctcacctggggaacgagctaccctgacgtgctctgctacctcctcagtgtcatat
attcactggtatcagcaacggcccgggcagtcccctagattgctcatttatagtacctctaatctggcctcaggtatccct
gcacgattttctggatctggttcaggttctgattacaccctcactatctctagcctggagcctgaagactttgccgtttat
tactgccagcagaggtctagctccccattcacctttgggagtgggaccaaggttgaaattaaaacgacaaccccggccccc
agaccaccaacgccagcccccaccatcgccagccaacccctgtctctgagaccagaagcctgtaggcctgccgccggtgga
gctgtgcacacaagaggactggatttcgcctgtgatatctacatttgggccccgctcgcaggcacatgtggagtgctcctc
ctctccctggtgattaccctgtactgcaaaaggggccgcaaaaaactcctttacatttttaagcagccttttatgaggcca
gtacagacgactcaagaggaagacgggtgctcatgccgctttcctgaggaggaggaaggagggtgcgaactgcgcgttaag
ttctcccgatcagccgacgcgcctgcttacaagcagggccagaaccaactgtacaacgagctgaatctcggtagacgggaa
gagtacgacgtgttggacaaacggagaggccgcgacccagaaatgggcggcaagcctcgcaggaaaaacccccaggaggga
ctgtacaatgagttgcagaaagataagatggcagaagcttatagcgagatcggaatgaagggggaaaggagacgagggaaa
ggacacgacggcctttatcagggcctgtccacagcaacaaaagatacgtatgacgccctccatatgcaggcacttccacca
cggtgataa
(amino acids)
(SEQ ID NO: 301)
MALPVTALLLPLALLLHAARPEVQLVESGGGLVKPGGSLRLSCAASGFTFSRYGMSWVRQAPGKRLEWVSTISGGGTYIY
YPDSVKGRFTISRDNAKNTLYLQMNSLRAEDTAVYYCTRDNYGRNYDYGMDYWGQGTLVTVSSGGGGSGGGGSGGGGSEI
VLTQSPATLSLSPGERATLTCSATSSVSYIHWYQQRPGQSPRLLIYSTSNLASGIPARFSGSGSGSDYTLTISSLEPEDF
AVYYCQQRSSSPFTFGSGTKVEIKTTTPAPRPPTPAPTIASQPLSLRPEACRPAAGGAVHTRGLDFACDIYIWAPLAGTC
GVLLLSLVITLYCKRGRKKLLYIFKQPFMRPVQTTQEEDGCSCRFPEEEEGGCELRVKFSRSADAPAYKQGQNQLYNELN
LGRREEYDVLDKRRGRDPEMGGKPRRKNPQEGLYNELQKDKMAEAYSEIGMKGERRRGKGHDGLYQGLSTATKDTYDALH
MQALPPR**
CAR-T E6 4-1BB/CD3z gBLOCK sequence:
(DNA)
(SEQ ID NO: 302)
tggagctgtgcacacaagaggactggatttcgcctgtgatatctacatttgggccccgctcgcaggcacatgtggagtgct
cctcctctccctggtgattaccctgtactgcaaaaggggccgcaaaaaactcctttacatttttaagcagccttttatgag
gccagtacagacgactcaagaggaagacgggtgctcatgccgctttcctgaggaggaggaaggagggtgcgaactgcgcgt
taagttctcccgatcagccgacgcgcctgcttacaagcagggccagaaccaactgtacaacgagctgaatctcggtagacg
ggaagagtacgacgtgttggacaaacggagaggccgcgacccagaaatgggcggcaagcctcgcaggaaaaacccccagga
gggactgtacaatgagttgcagaaagataagatggcagaagcttatagcgagatcggaatgaagggggaaaggagacgagg
gaaaggacacgacggcctttatcagggcctgtccacagcaacaaaagatacgtatgacgccctccatatgcaggcacttcc
accacggtgataagtttaaacccgctgatcagcctcgactgtgc
CAR-T E6 CD8/CD8/CD28/4-1BB/CD3z sequence:
N-CD8ls-huMNE6scFv-CD8ecd fragment-CD8 transmembrane-CD28-4-1BB-CD3zeta-C
(DNA)
(SEQ ID NO: 303)
atggccctgcccgtgaccgctttgctgctccccctggcgctgctgctgcacgccgccaggccagaggtccagctggttgag
agtggcggtgggctggttaagcctggcggctccctgcggctgagctgcgccgcgagtggatttactttcagccgatatggg
atgagttgggtgcggcaagctcccgggaagaggctggaatgggtctcaacaatctccggggggggcacttacatctattac
cccgactcagtcaaggggagatttaccatttcacgagacaacgctaagaataccctgtatttgcagatgaattctctgaga
gcagaggacacagctgtttactattgtacccgcgacaactatggcaggaactacgactacggtatggactattggggacaa
gggacattggttacagtgagcagtggcggcgggggcagcggaggaggaggcagcggtggggggggcagcgagatagtgctc
acgcagtcacccgcgactctcagtctctcacctggggaacgagctaccctgacgtgctctgctacctcctcagtgtcatat
attcactggtatcagcaacggcccgggcagtcccctagattgctcatttatagtacctctaatctggcctcaggtatccct
gcacgattttctggatctggttcaggttctgattacaccctcactatctctagcctggagcctgaagactttgccgtttat
tactgccagcagaggtctagctccccattcacctttgggagtgggaccaaggttgaaattaaaacgacaaccccggccccc
agaccaccaacgccagcccccaccatcgccagccaacccctgtctctgagaccagaagcctgtaggcctgccgccggtgga
gctgtgcacacaagaggactggatttcgcctgtgatatctacatttgggccccgctcgcaggcacatgtggagtgctcctc
ctctccctggtgattaccctgtactgcagaagcaagcggtctcggctcctgcattctgattacatgaacatgaccccaaga
agaccaggccccaccaggaaacattaccagccctacgctccgccacgcgacttcgctgcctaccggtccaaaaggggccgc
aaaaaactcctttacatttttaagcagccttttatgaggccagtacagacgactcaagaggaagacgggtgctcatgccgc
tttcctgaggaggaggaaggagggtgcgaactgcgcgttaagttctcccgatcagccgacgcgcctgcttacaagcagggc
cagaaccaactgtacaacgagctgaatctcggtagacgggaagagtacgacgtgttggacaaacggagaggccgcgaccca
gaaatgggcggcaagcctcgcaggaaaaacccccaggagggactgtacaatgagttgcagaaagataagatggcagaagct
tatagcgagatcggaatgaagggggaaaggagacgagggaaaggacacgacggcctttatcagggcctgtccacagcaaca
aaagatacgtatgacgccctccatatgcaggcacttccaccacggtgataa
(amino acids)
(SEQ ID NO: 304)
MALPVTALLLPLALLLHAARPEVQLVESGGGLVKPGGSLRLSCAASGFTFSRYGMSWVRQAPGKRLEWVSTISGGGTYIY
YPDSVKGRFTISRDNAKNTLYLQMNSLRAEDTAVYYCTRDNYGRNYDYGMDYWGQGTLVTVSSGGGGSGGGGSGGGGSEI
VLTQSPATLSLSPGERATLTCSATSSVSYIHWYQQRPGQSPRLLIYSTSNLASGIPARFSGSGSGSDYTLTISSLEPEDF
AVYYCQQRSSSPFTFGSGTKVEIKTTTPAPRPPTPAPTIASQPLSLRPEACRPAAGGAVHTRGLDFACDIYIWAPLAGTC
GVLLLSLVITLYCRSKRSRLLHSDYMNMTPRRPGPTRKHYQPYAPPRDFAAYRSKRGRKKLLYIFKQPFMRPVQTTQEED
GCSCRFPEEEEGGCELRVKFSRSADAPAYKQGQNQLYNELNLGRREEYDVLDKRRGRDPEMGGKPRRKNPQEGLYNELQK
DKMAEAYSEIGMKGERRRGKGHDGLYQGLSTATKDTYDALHMQALPPR**
CAR-T E6 CD28/4-1BB/CD3z gBLOCK sequence:
(DNA)
(SEQ ID NO: 305)
atagggagacccaagctggctagttaagcttggtaccgagggccaccatggccctgcccgtgaccgctttgctgctccccc
tggcgctgctgctgcacgccgccaggccagaggtccagctggttgagagtggcggtgggctggttaagcctggcggctccc
tgcggctgagctgcgccgcgagtggatttactttcagccgatatgggatgagttgggtgcggcaagctcccgggaagaggc
tggaatgggtctcaacaatctccggggggggcacttacatctattaccccgactcagtcaaggggagatttaccatttcac
gagacaacgctaagaataccctgtatttgcagatgaattctctgagagcagaggacacagctgtttactattgtacccgcg
acaactatggcaggaactacgactacggtatggactattggggacaagggacattggttacagtgagcagtggcggcgggg
gcagcggaggaggaggcagcggtggggggggcagcgagatagtgctcacgcagtcacccgcgactctcagtctctcacctg
gggaacgagctaccctgacgtgctctgctacctcctcagtgtcatatattcactggtatcagcaacggcccgggcagtccc
ctagattgctcatttatagtacctctaatctggcctcaggtatccctgcacgattttctggatctggttcaggttctgatt
acaccctcactatctctagcctggagcctgaagactttgccgtttattactgccagcagaggtctagctccccattcacct
ttgggagtgggaccaaggttgaaattaaaacgacaaccccggcccccagaccaccaacgccagcccccaccatcgccagcc
aacccctgtctctgagaccagaagcctgtaggcctgccgccggtggagctgtgcacacaagaggactggatttcgcctgtg
atatctacatttgggccccgctcgcaggcacatgtggagtgctcctcctctccctggtgattaccctgtactgcagaagca
agcggtctcggctcctgcattctgattacatgaacatgaccccaagaagaccaggccccaccaggaaacattaccagccct
acgctccgccacgcgacttcgctgcctaccggtccaaaaggggccgcaaaaaactcctttacatttttaagcagcctttta
tgaggccagtacagacgactcaagaggaagacgggtgctcatgccgctttcctgaggaggaggaaggagggtgcgaactgc
gcgttaagttctcccgatcagccgacgcgcctgcttacaagcagggccagaaccaactgtacaacgagctgaatctcggta
gacgggaagagtacgacgtgttggacaaacggagaggccgcgacccagaaatgggcggcaagcctcgcaggaaaaaccccc
aggagggactgtacaatgagttgcagaaagataagatggcagaagcttatagcgagatcggaatgaagggggaaaggagac
gagggaaaggacacgacggcctttatcagggcctgtccacagcaacaaaagatacgtatgacgccctccatatgcaggcac
ttccaccacggtgataagtttaaacccgctgatcagcctcgactgtgc
CAR-T C2 CD8/CD8/CD28/4-1BB/CD3z sequence:
N-CD81s-huMNC2scFv-CD8ecd fragment-CD8 transmembrane-CD28-4-1BB-CD3zeta-C
(DNA)
(SEQ ID NO: 306)
atggccttgccagtgacggccctgctgctgccattggctcttctgttgcacgctgccaggcctgaagtgcagctcgtagag
agtggcgggggactggtgaagcccggtggaagcctcagactcagttgcgccgcctcaggtttcactttttcaggttacgcc
atgtcctgggtaagacaggcaccggggaaaggactcgagtgggtgtctactatcagctcaggaggcacttatatatattat
cctgactctgtaaaaggccgatttacgatttctcgcgacaatgcaaagaactccctctacctccaaatgaacagtcttagg
gcagaagacactgctgtatactattgtgcacgcctcggcggcgacaactactacgagtactttgacgtgtgggggaaaggg
actaccgtgacagtttcaagcggaggaggtggctcaggtggaggcgggtcaggggggggaggaagtgatattgtgctcaca
caatccccagcctccctggctgtgtctcccggccaacgcgctacaattacatgtcgggcctccaaaagcgtgagcaccagc
ggctacagctacatgcactggtatcaacagaaaccaggacaaccccccaaactgttgatttatctcgcttcaaacttggag
tccggcgtgcctgcgcgcttttcagggagtgggagcggcacagattttacgctgactatcaaccccgtagaagcaaacgat
acagcgaattattattgtcaacattcccgggaactcccctttacgttcggcgggggcacaaaggtcgaaattaagagaacc
acgacaaccccggcccccagaccaccaacgccagcccccaccatcgccagccaacccctgtctctgagaccagaagcctgt
aggcctgccgccggtggagctgtgcacacaagaggactggatttcgcctgtgatatctacatttgggccccgctcgcaggc
acatgtggagtgctcctcctctccctggtgattaccctgtactgcagaagcaagcggtctcggctcctgcattctgattac
atgaacatgaccccaagaagaccaggccccaccaggaaacattaccagccctacgctccgccacgcgacttcgctgcctac
cggtccaaaaggggccgcaaaaaactcctttacatttttaagcagccttttatgaggccagtacagacgactcaagaggaa
gacgggtgctcatgccgctttcctgaggaggaggaaggagggtgcgaactgcgcgttaagttctcccgatcagccgacgcg
cctgcttacaagcagggccagaaccaactgtacaacgagctgaatctcggtagacgggaagagtacgacgtgttggacaaa
cggagaggccgcgacccagaaatgggcggcaagcctcgcaggaaaaacccccaggagggactgtacaatgagttgcagaaa
gataagatggcagaagcttatagcgagatcggaatgaagggggaaaggagacgagggaaaggacacgacggcctttatcag
ggcctgtccacagcaacaaaagatacgtatgacgccctccatatgcaggcacttccaccacggtgataa
(amino acids)
(SEQ ID NO: 307)
EVQLVESGGGLVKPGGSLRLSCAASGFTFSGYAMSWVRQAPGKGLEWVSTISSGGTYIYYPDSVKGRFTISRDNAKNSLYL
QMNSLRAEDTAVYYCARLGGDNYYEYFDVWGKGTTVTVSSGGGGSGGGGSGGGGSDIVLTQSPASLAVSPGQRATITCRAS
KSVSTSGYSYMHWYQQKPGQPPKLLIYLASNLESGVPARFSGSGSGTDFTLTINPVEANDTANYYCQHSRELPFTFGGGTK
VEIKRTTTTPAPRPPTPAPTIASQPLSLRPEACRPAAGGAVHTRGLDFACDIYIWAPLAGTCGVLLLSLVITLYCRSKRSR
LLHSDYMNMTPRRPGPTRKHYQPYAPPRDFAAYRSKRGRKKLLYIFKQPFMRPVQTTQEEDGCSCRFPEEEEGGCELRVKF
SRSADAPAYKQGQNQLYNELNLGRREEYDVLDKRRGRDPEMGGKPRRKNPQEGLYNELQKDKMAEAYSEIGMKGERRRGKG
HDGLYQGLSTATKDTYDALHMQALPPR**
CAR-T C2-1 gBLOCK sequence:
(DNA)
(SEQ ID NO: 308)
atagggagacccaagctggctagttaagcttggtaccgagggccaccatggccttgccagtgacggccctgctgctgccat
tggctcttctgttgcacgctgccaggcctgaagtgcagctcgtagagagtggcgggggactggtgaagcccggtggaagcc
tcagactcagttgcgccgcctcaggtttcactttttcaggttacgccatgtcctgggtaagacaggcaccggggaaaggac
tcgagtgggtgtctactatcagctcaggaggcacttatatatattatcctgactctgtaaaaggccgatttacgatttctc
gcgacaatgcaaagaactccctctacctccaaatgaacagtcttagggcagaagacactgctgtatactattgtgcacgcc
tcggcggcgacaactactacgagtactttgacgtgtgggggaaagggactaccgtgacagtttcaagcggaggaggtggct
caggtggaggcgggtcaggggggggaggaagtgatattgtgctcacacaatccccagcctccctggc
CAR-T C2-2 gBLOCK sequence:
(DNA)
(SEQ ID NO: 309)
aagtgatattgtgctcacacaatccccagcctccctggctgtgtctcccggccaacgcgctacaattacatgtcgggcctc
caaaagcgtgagcaccagcggctacagctacatgcactggtatcaacagaaaccaggacaaccccccaaactgttgattta
tctcgcttcaaacttggagtccggcgtgcctgcgcgcttttcagggagtgggagcggcacagattttacgctgactatcaa
ccccgtagaagcaaacgatacagcgaattattattgtcaacattcccgggaactcccctttacgttcggcgggggcacaaa
ggtcgaaattaagagaaccacgacaaccccggcccccagaccaccaacgccagcccccaccatcgccagccaacccctgtc
tctgagaccagaagcctgtaggcctgccgccggtggagctgtgcacacaagaggactggatttcgcctgtgatatctacat
ttgggccccgctcgcaggcacatgtggagtgc
CAR E6 Fc/8/4-1BB/CD3z sequence:
N-CD81s-huMNE6scFv-Human IgG1 Fc-CD8 transmembrane-4-1BB-CD3zeta-C
(DNA)
(SEQ ID NO: 310)
atggccctgcccgtgaccgctttgctgctccccctggcgctgctgctgcacgccgccaggccagaggtccagctggttgag
agtggcggtgggctggttaagcctggcggctccctgcggctgagctgcgccgcgagtggatttactttcagccgatatggg
atgagttgggtgcggcaagctcccgggaagaggctggaatgggtctcaacaatctccggggggggcacttacatctattac
cccgactcagtcaaggggagatttaccatttcacgagacaacgctaagaataccctgtatttgcagatgaattctctgaga
gcagaggacacagctgtttactattgtacccgcgacaactatggcaggaactacgactacggtatggactattggggacaa
gggacattggttacagtgagcagtggcggcgggggcagcggaggaggaggcagcggtggcggaggcagcgagatagtgctc
acgcagtcacccgcgactctcagtctctcacctggggaacgagctaccctgacgtgctctgctacctcctcagtgtcatat
attcactggtatcagcaacggcccgggcagtcccctagattgctcatttatagtacctctaatctggcctcaggtatccct
gcacgattttctggatctggttcaggttctgattacaccctcactatctctagcctggagcctgaagactttgccgtttat
tactgccagcagaggtctagctccccattcacctttgggagtgggaccaaggttgaaattaaagagcccaaatcttgtgac
aaaactcacacatgcccaccgtgcccagcacctgaactcctggggggaccgtcagtcttcctcttccccccaaaacccaag
gacaccctcatgatctcccggacccctgaggtcacatgcgtggtggtggacgtgagccacgaagaccctgaggtcaagttc
aactggtacgtggacggcgtggaggtgcataatgccaagacaaagccgcgggaggagcagtacaacagcacgtaccgtgtg
gtcagcgtcctcaccgtcctgcaccaggactggctgaatggcaaggagtacaagtgcaaggtctccaacaaagccctccca
gcccccatcgagaaaaccatctccaaagccaaagggcagccccgagaaccacaggtgtacaccctgcccccatcccgggag
gagatgaccaagaaccaggtcagcctgacctgcctggtcaaaggcttctatcccagcgacatcgccgtggagtgggagagc
aatgggcagccggagaacaactacaagaccacgcctcccgtgctggactccgacggctccttcttcctctacagcaagctc
accgtggacaagagcaggtggcagcaggggaacgtcttctcatgctccgtgatgcatgaggctctgcacaaccactacacg
cagaagagcctctccctgtctccgggtaaaatctacatttgggccccgctcgcaggcacatgtggagtgctcctcctctcc
ctggtgattaccctgtactgcaaaaggggccgcaaaaaactcctttacatttttaagcagccttttatgaggccagtacag
acgactcaagaggaagacgggtgctcatgccgctttcctgaggaggaggaaggagggtgcgaactgcgcgttaagttctcc
cgatcagccgacgcgcctgcttacaagcagggccagaaccaactgtacaacgagctgaatctcggtagacgggaagagtac
gacgtgttggacaaacggagaggccgcgacccagaaatgggcggcaagcctcgcaggaaaaacccccaggagggactgtac
aatgagttgcagaaagataagatggcagaagcttatagcgagatcggaatgaagggggaaaggagacgagggaaaggacac
gacggcctttatcagggcctgtccacagcaacaaaagatacgtatgacgccctccatatgcaggcacttccaccacggtga
taa
(amino acids)
(SEQ ID NO: 311)
MALPVTALLLPLALLLHAARPEVQLVESGGGLVKPGGSLRLSCAASGFTFSRYGMSWVRQAPGKRLEWVSTISGGGTYIY
YPDSVKGRFTISRDNAKNTLYLQMNSLRAEDTAVYYCTRDNYGRNYDYGMDYWGQGTLVTVSSGGGGSGGGGSGGGGSEI
VLTQSPATLSLSPGERATLTCSATSSVSYIHWYQQRPGQSPRLLIYSTSNLASGIPARFSGSGSGSDYTLTISSLEPEDF
AVYYCQQRSSSPFTFGSGTKVEIKEPKSCDKTHTCPPCPAPELLGGPSVFLFPPKPKDTLMISRTPEVTCVVVDVSHEDP
EVKFNWYVDGVEVHNAKTKPREEQYNSTYRVVSVLTVLHQDWLNGKEYKCKVSNKALPAPIEKTISKAKGQPREPQVYTL
PPSREEMTKNQVSLTCLVKGFYPSDIAVEWESNGQPENNYKTTPPVLDSDGSFFLYSKLTVDKSRWQQGNVFSCSVMHEA
LHNHYTQKSLSLSPGKIYIWAPLAGTCGVLLLSLVITLYCKRGRKKLLYIFKQPFMRPVQTTQEEDGCSCRFPEEEEGGC
ELRVKFSRSADAPAYKQGQNQLYNELNLGRREEYDVLDKRRGRDPEMGGKPRRKNPQEGLYNELQKDKMAEAYSEIGMKG
ERRRGKGHDGLYQGLSTATKDTYDALHMQALPPR**
E6 CAR pCDH gBLOCK sequence:
(DNA)
(SEQ ID NO: 312)
acgctgttttgacctccatagaagattctagagctagctgtagagcttggtaccgagggccaccatggccctgcccgtgac
cgctttgctgctccccctggcgctgctgctgcacgccgccaggccagaggtccagctggttgagagtggcggtgggctggt
taagcctggcggctccctgcggctgagctgcgccgcgagtggatttactttcagccgatatgggatgagttgggtgcggca
agctcccgggaagaggctggaatgggtctcaacaatctccggggggggcacttacatctattaccccgactcagtcaaggg
gagatttaccatttcacgagacaacgctaagaataccctgtatttgcagatgaattctctgagagcagaggacacagctgt
ttactattgtacccgcgacaactatggcaggaactacgactacggtatggactattggggacaagggacattggttacagt
gagcagtggcggcgggggcagcggaggaggaggcagcggtggcggaggcagcgagatagtgctcacgcagtcacccgcgac
tctcagtctctcacctggggaacgagctaccctgacgtgctctgctacctcctcagtgtcatatattcactggtatcagca
acggcccgggcagtcccctagattgctcatttatagtacctctaatctggcctcaggtatccctgc
E6 CAR Fc pCDH gBLOCK sequence:
(DNA)
(SEQ ID NO: 313)
agtacctctaatctggcctcaggtatccctgcacgattttctggatctggttcaggttctgattacaccctcactatctct
agcctggagcctgaagactttgccgtttattactgccagcagaggtctagctccccattcacctttgggagtgggaccaag
gttgaaattaaagagcccaaatcttgtgacaaaactcacacatgcccaccgtgcccagcacctgaactcctggggggaccg
tcagtcttcctcttccccccaaaacccaaggacaccctcatgatctcccggacccctgaggtcacatgcgtggtggtggac
gtgagccacgaagaccctgaggtcaagttcaactggtacgtggacggcgtggaggtgcataatgccaagacaaagccgcgg
gaggagcagtacaacagcacgtaccgtgtggtcagcgtcctcaccgtcctgcaccaggactggctgaatggcaaggagtac
aagtgcaaggtctccaacaaagccctcccagcccccatcgagaaaaccatctccaaagccaaagggcagccccgagaacca
caggtgtacaccctgcccccatcccgggaggagatgaccaagaaccaggtcagcctgacctgcctggtcaaaggcttctat
cccagcgacatcgccgtggagtgggagagcaatgggcagccggagaacaactacaagaccacgcctcccgtgctg
E6 CAR 8BB3 pCDH gBLOCK sequence:
(DNA)
(SEQ ID NO: 314)
agaacaactacaagaccacgcctcccgtgctggactccgacggctccttcttcctctacagcaagctcaccgtggacaaga
gcaggtggcagcaggggaacgtcttctcatgctccgtgatgcatgaggctctgcacaaccactacacgcagaagagcctct
ccctgtctccgggtaaaatctacatttgggccccgctcgcaggcacatgtggagtgctcctcctctccctggtgattaccc
tgtactgcaaaaggggccgcaaaaaactcctttacatttttaagcagccttttatgaggccagtacagacgactcaagagg
aagacgggtgctcatgccgctttcctgaggaggaggaaggagggtgcgaactgcgcgttaagttctcccgatcagccgacg
cgcctgcttacaagcagggccagaaccaactgtacaacgagctgaatctcggtagacgggaagagtacgacgtgttggaca
aacggagaggccgcgacccagaaatgggcggcaagcctcgcaggaaaaacccccaggagggactgtacaatgagttgcaga
aagataagatggcagaagcttatagcgagatcggaatgaagggggaaaggagacgagggaaaggacacgacggcctttatc
agggcctgtccacagcaacaaaagatacgtatgacgccctccatatgcaggcacttccaccacggtgataagtttaaaccc
gctgatcaggcggccgcgaaggatctgcgatcgctccggtgcccgtcag
CAR E6 FcH/8/4-1BB/CD3z sequence:
N-CD81s-huMNE6scFv-Human IgG1 hingeless Fc Y407R-CD8 transmembrane-4-1BB-
CD3zeta-C
(DNA)
(SEQ ID NO: 315)
atggccctgcccgtgaccgctttgctgctccccctggcgctgctgctgcacgccgccaggccagaggtccagctggttgag
agtggcggtgggctggttaagcctggcggctccctgcggctgagctgcgccgcgagtggatttactttcagccgatatggg
atgagttgggtgcggcaagctcccgggaagaggctggaatgggtctcaacaatctccggggggggcacttacatctattac
cccgactcagtcaaggggagatttaccatttcacgagacaacgctaagaataccctgtatttgcagatgaattctctgaga
gcagaggacacagctgtttactattgtacccgcgacaactatggcaggaactacgactacggtatggactattggggacaa
gggacattggttacagtgagcagtggcggcgggggcagcggaggaggaggcagcggtggcggaggcagcgagatagtgctc
acgcagtcacccgcgactctcagtctctcacctggggaacgagctaccctgacgtgctctgctacctcctcagtgtcatat
attcactggtatcagcaacggcccgggcagtcccctagattgctcatttatagtacctctaatctggcctcaggtatccct
gcacgattttctggatctggttcaggttctgattacaccctcactatctctagcctggagcctgaagactttgccgtttat
tactgccagcagaggtctagctccccattcacctttgggagtgggaccaaggttgaaattaaagcacctgaactcctgggg
ggaccgtcagtcttcctcttccccccaaaacccaaggacaccctcatgatctcccggacccctgaggtcacatgcgtggtg
gtggacgtgagccacgaagaccctgaggtcaagttcaactggtacgtggacggcgtggaggtgcataatgccaagacaaag
ccgcgggaggagcagtacaacagcacgtaccgtgtggtcagcgtcctcaccgtcctgcaccaggactggctgaatggcaag
gagtacaagtgcaaggtctccaacaaagccctcccagcccccatcgagaaaaccatctccaaagccaaagggcagccccga
gaaccacaggtgtacaccctgcccccatcccgggaggagatgaccaagaaccaggtcagcctgacctgcctggtcaaaggc
ttctatcccagcgacatcgccgtggagtgggagagcaatgggcagccggagaacaactacaagaccacgcctcccgtgctg
gactccgacggctccttcttcctctacagcaagctcaccgtggacaagagcaggtggcagcaggggaacgtcttctcatgc
tccgtgatgcatgaggctctgcacaaccactacacgcagaagagcctctccctgtctccgggtaaaatctacatttgggcc
ccgctcgcaggcacatgtggagtgctcctcctctccctggtgattaccctgtactgcaaaaggggccgcaaaaaactcctt
tacatttttaagcagccttttatgaggccagtacagacgactcaagaggaagacgggtgctcatgccgctttcctgaggag
gaggaaggagggtgcgaactgcgcgttaagttctcccgatcagccgacgcgcctgcttacaagcagggccagaaccaactg
tacaacgagctgaatctcggtagacgggaagagtacgacgtgttggacaaacggagaggccgcgacccagaaatgggcggc
aagcctcgcaggaaaaacccccaggagggactgtacaatgagttgcagaaagataagatggcagaagcttatagcgagatc
ggaatgaagggggaaaggagacgagggaaaggacacgacggcctttatcagggcctgtccacagcaacaaaagatacgtat
gacgccctccatatgcaggcacttccaccacggtgataa
(amino acids)
(SEQ ID NO: 316)
MALPVTALLLPLALLLHAARPEVQLVESGGGLVKPGGSLRLSCAASGFTFSRYGMSWVRQAPGKRLEWVSTISGGGTYIY
YPDSVKGRFTISRDNAKNTLYLQMNSLRAEDTAVYYCTRDNYGRNYDYGMDYWGQGTLVTVSSGGGGSGGGGSGGGGSEI
VLTQSPATLSLSPGERATLTCSATSSVSYIHWYQQRPGQSPRLLIYSTSNLASGIPARFSGSGSGSDYTLTISSLEPEDF
AVYYCQQRSSSPFTFGSGTKVEIKAPELLGGPSVFLFPPKPKDTLMISRTPEVTCVVVDVSHEDPEVKFNWYVDGVEVHN
AKTKPREEQYNSTYRVVSVLTVLHQDWLNGKEYKCKVSNKALPAPIEKTISKAKGQPREPQVYTLPPSREEMTKNQVSLT
CLVKGFYPSDIAVEWESNGQPENNYKTTPPVLDSDGSFFLYSKLTVDKSRWQQGNVFSCSVMHEALHNHYTQKSLSLSPG
KIYIWAPLAGTCGVLLLSLVITLYCKRGRKKLLYIFKQPFMRPVQTTQEEDGCSCRFPEEEEGGCELRVKFSRSADAPAY
KQGQNQLYNELNLGRREEYDVLDKRRGRDPEMGGKPRRKNPQEGLYNELQKDKMAEAYSEIGMKGERRRGKGHDGLYQGL
STATKDTYDALHMQALPPR**
E6 CAR FcH PCDH gBLOCK sequence:
(DNA)
(SEQ ID NO: 317)
agtacctctaatctggcctcaggtatccctgcacgattttctggatctggttcaggttctgattacaccctcactatctct
agcctggagcctgaagactttgccgtttattactgccagcagaggtctagctccccattcacctttgggagtgggaccaag
gttgaaattaaagcacctgaactcctggggggaccgtcagtcttcctcttccccccaaaacccaaggacaccctcatgatc
tcccggacccctgaggtcacatgcgtggtggtggacgtgagccacgaagaccctgaggtcaagttcaactggtacgtggac
ggcgtggaggtgcataatgccaagacaaagccgcgggaggagcagtacaacagcacgtaccgtgtggtcagcgtcctcacc
gtcctgcaccaggactggctgaatggcaaggagtacaagtgcaaggtctccaacaaagccctcccagcccccatcgagaaa
accatctccaaagccaaagggcagccccgagaaccacaggtgtacaccctgcccccatcccgggaggagatgaccaagaac
caggtcagcctgacctgcctggtcaaaggcttctatcccagcgacatcgccgtggagtgggagagcaatgggcagccggag
aacaactacaagaccacgcctcccgtgctg
CAR E6 Fc/4/4-1BB/CD3z sequence:
N-CD8ls-huMNE6scFv-Human IgG1 Fc-CD4 transmembrane-CD28-4-1BB-CD3zeta-C
(DNA)
(SEQ ID NO: 318)
atggccctgcccgtgaccgctttgctgctccccctggcgctgctgctgcacgccgccaggccagaggtccagctggttgag
agtggcggtgggctggttaagcctggcggctccctgcggctgagctgcgccgcgagtggatttactttcagccgatatggg
atgagttgggtgcggcaagctcccgggaagaggctggaatgggtctcaacaatctccggggggggcacttacatctattac
cccgactcagtcaaggggagatttaccatttcacgagacaacgctaagaataccctgtatttgcagatgaattctctgaga
gcagaggacacagctgtttactattgtacccgcgacaactatggcaggaactacgactacggtatggactattggggacaa
gggacattggttacagtgagcagtggcggcgggggcagcggaggaggaggcagcggtggcggaggcagcgagatagtgctc
acgcagtcacccgcgactctcagtctctcacctggggaacgagctaccctgacgtgctctgctacctcctcagtgtcatat
attcactggtatcagcaacggcccgggcagtcccctagattgctcatttatagtacctctaatctggcctcaggtatccct
gcacgattttctggatctggttcaggttctgattacaccctcactatctctagcctggagcctgaagactttgccgtttat
tactgccagcagaggtctagctccccattcacctttgggagtgggaccaaggttgaaattaaagagcccaaatcttgtgac
aaaactcacacatgcccaccgtgcccagcacctgaactcctggggggaccgtcagtcttcctcttccccccaaaacccaag
gacaccctcatgatctcccggacccctgaggtcacatgcgtggtggtggacgtgagccacgaagaccctgaggtcaagttc
aactggtacgtggacggcgtggaggtgcataatgccaagacaaagccgcgggaggagcagtacaacagcacgtaccgtgtg
gtcagcgtcctcaccgtcctgcaccaggactggctgaatggcaaggagtacaagtgcaaggtctccaacaaagccctccca
gcccccatcgagaaaaccatctccaaagccaaagggcagccccgagaaccacaggtgtacaccctgcccccatcccgggag
gagatgaccaagaaccaggtcagcctgacctgcctggtcaaaggcttctatcccagcgacatcgccgtggagtgggagagc
aatgggcagccggagaacaactacaagaccacgcctcccgtgctggactccgacggctccttcttcctctacagcaagctc
accgtggacaagagcaggtggcagcaggggaacgtcttctcatgctccgtgatgcatgaggctctgcacaaccactacacg
cagaagagcctctccctgtctccgggtaaaatggccctgattgtgctggggggcgtcgccggcctcctgcttttcattggg
ctaggcatcttcttcaaaaggggccgcaaaaaactcctttacatttttaagcagccttttatgaggccagtacagacgact
caagaggaagacgggtgctcatgccgctttcctgaggaggaggaaggagggtgcgaactgcgcgttaagttctcccgatca
gccgacgcgcctgcttacaagcagggccagaaccaactgtacaacgagctgaatctcggtagacgggaagagtacgacgtg
ttggacaaacggagaggccgcgacccagaaatgggcggcaagcctcgcaggaaaaacccccaggagggactgtacaatgag
ttgcagaaagataagatggcagaagcttatagcgagatcggaatgaagggggaaaggagacgagggaaaggacacgacggc
ctttatcagggcctgtccacagcaacaaaagatacgtatgacgccctccatatgcaggcacttccaccacggtgataa
(amino acids)
(SEQ ID NO: 319)
MALPVTALLLPLALLLHAARPEVQLVESGGGLVKPGGSLRLSCAASGFTFSRYGMSWVRQAPGKRLEWVSTISGGGTYIY
YPDSVKGRFTISRDNAKNTLYLQMNSLRAEDTAVYYCTRDNYGRNYDYGMDYWGQGTLVTVSSGGGGSGGGGSGGGGSEI
VLTQSPATLSLSPGERATLTCSATSSVSYIHWYQQRPGQSPRLLIYSTSNLASGIPARFSGSGSGSDYTLTISSLEPEDF
AVYYCQQRSSSPFTFGSGTKVEIKEPKSCDKTHTCPPCPAPELLGGPSVFLFPPKPKDTLMISRTPEVTCVVVDVSHEDP
EVKFNWYVDGVEVHNAKTKPREEQYNSTYRVVSVLTVLHQDWLNGKEYKCKVSNKALPAPIEKTISKAKGQPREPQVYTL
PPSREEMTKNQVSLTCLVKGFYPSDIAVEWESNGQPENNYKTTPPVLDSDGSFFLYSKLTVDKSRWQQGNVFSCSVMHEA
LHNHYTQKSLSLSPGKMALIVLGGVAGLLLFIGLGIFFKRGRKKLLYIFKQPFMRPVQTTQEEDGCSCRFPEEEEGGCEL
RVKFSRSADAPAYKQGQNQLYNELNLGRREEYDVLDKRRGRDPEMGGKPRRKNPQEGLYNELQKDKMAEAYSEIGMKGER
RRGKGHDGLYQGLSTATKDTYDALHMQALPPR**
E6 CAR 44BB3 pCDH gBLOCK sequence:
(DNA)
(SEQ ID NO: 320)
agaacaactacaagaccacgcctcccgtgctggactccgacggctccttcttcctctacagcaagctcaccgtggacaaga
gcaggtggcagcaggggaacgtcttctcatgctccgtgatgcatgaggctctgcacaaccactacacgcagaagagcctct
ccctgtctccgggtaaaatggccctgattgtgctggggggcgtcgccggcctcctgcttttcattgggctaggcatcttct
tcaaaaggggccgcaaaaaactcctttacatttttaagcagccttttatgaggccagtacagacgactcaagaggaagacg
ggtgctcatgccgctttcctgaggaggaggaaggagggtgcgaactgcgcgttaagttctcccgatcagccgacgcgcctg
cttacaagcagggccagaaccaactgtacaacgagctgaatctcggtagacgggaagagtacgacgtgttggacaaacgga
gaggccgcgacccagaaatgggcggcaagcctcgcaggaaaaacccccaggagggactgtacaatgagttgcagaaagata
agatggcagaagcttatagcgagatcggaatgaagggggaaaggagacgagggaaaggacacgacggcctttatcagggcc
tgtccacagcaacaaaagatacgtatgacgccctccatatgcaggcacttccaccacggtgataagtttaaacccgctgat
caggcggccgcgaaggatctgcgatcgctccggtgcccgtcag
CAR E6 FcH/4/4-1BB/CD3z sequence:
N-CD81s-huMNE6scFv-Human IgG1 hingeless Fc Y407R-CD4 transmembrane-CD28-4-1BB-
CD3zeta-C
(DNA)
(SEQ ID NO: 321)
atggccctgcccgtgaccgctttgctgctccccctggcgctgctgctgcacgccgccaggccagaggtccagctggttgag
agtggcggtgggctggttaagcctggcggctccctgcggctgagctgcgccgcgagtggatttactttcagccgatatggg
atgagttgggtgcggcaagctcccgggaagaggctggaatgggtctcaacaatctccggggggggcacttacatctattac
cccgactcagtcaaggggagatttaccatttcacgagacaacgctaagaataccctgtatttgcagatgaattctctgaga
gcagaggacacagctgtttactattgtacccgcgacaactatggcaggaactacgactacggtatggactattggggacaa
gggacattggttacagtgagcagtggcggcgggggcagcggaggaggaggcagcggtggcggaggcagcgagatagtgctc
acgcagtcacccgcgactctcagtctctcacctggggaacgagctaccctgacgtgctctgctacctcctcagtgtcatat
attcactggtatcagcaacggcccgggcagtcccctagattgctcatttatagtacctctaatctggcctcaggtatccct
gcacgattttctggatctggttcaggttctgattacaccctcactatctctagcctggagcctgaagactttgccgtttat
tactgccagcagaggtctagctccccattcacctttgggagtgggaccaaggttgaaattaaagcacctgaactcctgggg
ggaccgtcagtcttcctcttccccccaaaacccaaggacaccctcatgatctcccggacccctgaggtcacatgcgtggtg
gtggacgtgagccacgaagaccctgaggtcaagttcaactggtacgtggacggcgtggaggtgcataatgccaagacaaag
ccgcgggaggagcagtacaacagcacgtaccgtgtggtcagcgtcctcaccgtcctgcaccaggactggctgaatggcaag
gagtacaagtgcaaggtctccaacaaagccctcccagcccccatcgagaaaaccatctccaaagccaaagggcagccccga
gaaccacaggtgtacaccctgcccccatcccgggaggagatgaccaagaaccaggtcagcctgacctgcctggtcaaaggc
ttctatcccagcgacatcgccgtggagtgggagagcaatgggcagccggagaacaactacaagaccacgcctcccgtgctg
gactccgacggctccttcttcctctacagcaagctcaccgtggacaagagcaggtggcagcaggggaacgtcttctcatgc
tccgtgatgcatgaggctctgcacaaccactacacgcagaagagcctctccctgtctccgggtaaaatggccctgattgtg
ctggggggcgtcgccggcctcctgcttttcattgggctaggcatcttcttcaaaaggggccgcaaaaaactcctttacatt
tttaagcagccttttatgaggccagtacagacgactcaagaggaagacgggtgctcatgccgctttcctgaggaggaggaa
ggagggtgcgaactgcgcgttaagttctcccgatcagccgacgcgcctgcttacaagcagggccagaaccaactgtacaac
gagctgaatctcggtagacgggaagagtacgacgtgttggacaaacggagaggccgcgacccagaaatgggcggcaagcct
cgcaggaaaaacccccaggagggactgtacaatgagttgcagaaagataagatggcagaagcttatagcgagatcggaatg
aagggggaaaggagacgagggaaaggacacgacggcctttatcagggcctgtccacagcaacaaaagatacgtatgacgcc
ctccatatgcaggcacttccaccacggtgataa
(amino acids)
(SEQ ID NO: 322)
MALPVTALLLPLALLLHAARPEVQLVESGGGLVKPGGSLRLSCAASGFTFSRYGMSWVRQAPGKRLEWVSTISGGGTYIY
YPDSVKGRFTISRDNAKNTLYLQMNSLRAEDTAVYYCTRDNYGRNYDYGMDYWGQGTLVTVSSGGGGSGGGGSGGGGSEI
VLTQSPATLSLSPGERATLTCSATSSVSYIHWYQQRPGQSPRLLIYSTSNLASGIPARFSGSGSGSDYTLTISSLEPEDF
AVYYCQQRSSSPFTFGSGTKVEIKAPELLGGPSVFLFPPKPKDTLMISRTPEVTCVVVDVSHEDPEVKENWYVDGVEVHN
AKTKPREEQYNSTYRVVSVLTVLHQDWLNGKEYKCKVSNKALPAPIEKTISKAKGQPREPQVYTLPPSREEMTKNQVSLT
CLVKGFYPSDIAVEWESNGQPENNYKTTPPVLDSDGSFFLYSKLTVDKSRWQQGNVFSCSVMHEALHNHYTQKSLSLSPG
KMALIVLGGVAGLLLFIGLGIFFKRGRKKLLYIFKQPFMRPVQTTQEEDGCSCRFPEEEEGGCELRVKFSRSADAPAYKQ
GQNQLYNELNLGRREEYDVLDKRRGRDPEMGGKPRRKNPQEGLYNELQKDKMAEAYSEIGMKGERRRGKGHDGLYQGLST
ATKDTYDALHMQALPPR**
CAR E6 IgD/8/4-1BB/CD3z sequence:
N-CD81s-huMNE6scFv-IgD hinge region-CD8 transmembrane-4-1BB-CD3zeta-C
(DNA)
(SEQ ID NO: 323)
atggccctgcccgtgaccgctttgctgctccccctggcgctgctgctgcacgccgccaggccagaggtccagctggttgag
agtggcggtgggctggttaagcctggcggctccctgcggctgagctgcgccgcgagtggatttactttcagccgatatggg
atgagttgggtgcggcaagctcccgggaagaggctggaatgggtctcaacaatctccggggggggcacttacatctattac
cccgactcagtcaaggggagatttaccatttcacgagacaacgctaagaataccctgtatttgcagatgaattctctgaga
gcagaggacacagctgtttactattgtacccgcgacaactatggcaggaactacgactacggtatggactattggggacaa
gggacattggttacagtgagcagtggcggcgggggcagcggaggaggaggcagcggtggcggaggcagcgagatagtgctc
acgcagtcacccgcgactctcagtctctcacctggggaacgagctaccctgacgtgctctgctacctcctcagtgtcatat
attcactggtatcagcaacggcccgggcagtcccctagattgctcatttatagtacctctaatctggcctcaggtatccct
gcacgattttctggatctggttcaggttctgattacaccctcactatctctagcctggagcctgaagactttgccgtttat
tactgccagcagaggtctagctccccattcacctttgggagtgggaccaaggttgaaattaaagagtctccaaaggcaca
ggcctcctcagtgcccactgcacaaccccaagcagagggcagcctcgccaaggcaaccacagccccagccaccacccgta
acacaggaagaggcggcgaagagaagaaaaaggagaaggagaaagaggaacaagaagagagagagacaaagacaccaatc
tacatttgggccccgctcgcaggcacatgtggagtgctcctcctctccctggtgattaccctgtactgcaaaaggggccgc
aaaaaactcctttacatttttaagcagccttttatgaggccagtacagacgactcaagaggaagacgggtgctcatgccgc
tttcctgaggaggaggaaggagggtgcgaactgcgcgttaagttctcccgatcagccgacgcgcctgcttacaagcagggc
cagaaccaactgtacaacgagctgaatctcggtagacgggaagagtacgacgtgttggacaaacggagaggccgcgaccca
gaaatgggcggcaagcctcgcaggaaaaacccccaggagggactgtacaatgagttgcagaaagataagatggcagaagct
tatagcgagatcggaatgaagggggaaaggagacgagggaaaggacacgacggcctttatcagggcctgtccacagcaaca
aaagatacgtatgacgccctccatatgcaggcacttccaccacggtgataa
(amino acids)
(SEQ ID NO: 324)
MALPVTALLLPLALLLHAARPEVQLVESGGGLVKPGGSLRLSCAASGFTFSRYGMSWVRQAPGKRLEWVSTISGGGTYIY
YPDSVKGRFTISRDNAKNTLYLQMNSLRAEDTAVYYCTRDNYGRNYDYGMDYWGQGTLVTVSSGGGGSGGGGSGGGGSEI
VLTQSPATLSLSPGERATLTCSATSSVSYIHWYQQRPGQSPRLLIYSTSNLASGIPARFSGSGSGSDYTLTISSLEPEDF
AVYYCQQRSSSPFTFGSGTKVEIKESPKAQASSVPTAQPQAEGSLAKATTAPATTRNTGRGGEEKKKEKEKEEQEERETK
TPIYIWAPLAGTCGVLLLSLVITLYCKRGRKKLLYIFKQPFMRPVQTTQEEDGCSCRFPEEEEGGCELRVKFSRSADAPA
YKQGQNQLYNELNLGRREEYDVLDKRRGRDPEMGGKPRRKNPQEGLYNELQKDKMAEAYSEIGMKGERRRGKGHDGLYQG
LSTATKDTYDALHMQALPPR**
E6 CAR IgD8 pcDH gBLOCK sequence:
(DNA)
(SEQ ID NO: 325)
agtacctctaatctggcctcaggtatccctgcacgattttctggatctggttcaggttctgattacaccctcactatctct
agcctggagcctgaagactttgccgtttattactgccagcagaggtctagctccccattcacctttgggagtgggaccaag
gttgaaattaaagagtctccaaaggcacaggcctcctcagtgcccactgcacaaccccaagcagagggcagcctcgccaa
ggcaaccacagccccagccaccacccgtaacacaggaagaggcggcgaagagaagaaaaaggagaaggagaaagaggaac
aagaagagagagagacaaagacaccaatctacatttgggccccgctcgcaggcacatgtggagtgctcctcctctccctg
gtgattaccctgtactgcaaaaggggccgcaaaaaactcctttacatttttaagcagccttttatgaggccag
E6 CAR BB 3 pCDH gBLOCK sequence:
(DNA)
(SEQ ID NO: 326)
acatttttaagcagccttttatgaggccagtacagacgactcaagaggaagacgggtgctcatgccgctttcctgaggagg
aggaaggagggtgcgaactgcgcgttaagttctcccgatcagccgacgcgcctgcttacaagcagggccagaaccaactgt
acaacgagctgaatctcggtagacgggaagagtacgacgtgttggacaaacggagaggccgcgacccagaaatgggcggca
agcctcgcaggaaaaacccccaggagggactgtacaatgagttgcagaaagataagatggcagaagcttatagcgagatcg
gaatgaagggggaaaggagacgagggaaaggacacgacggcctttatcagggcctgtccacagcaacaaaagatacgtatg
acgccctccatatgcaggcacttccaccacggtgataagtttaaacccgctgatcaggcggccgcgaaggatctgcgatcg
ctccggtgcccgtcag
CAR E6 IgD/4/4-1BB/CD3z sequence:
N-CD81s-huMNE6scFv-IgD hinge region-CD4 transmembrane-4-1BB-CD3zeta-C
(DNA)
(SEQ ID NO: 327)
atggccctgcccgtgaccgctttgctgctccccctggcgctgctgctgcacgccgccaggccagaggtccagctggttgag
agtggcggtgggctggttaagcctggcggctccctgcggctgagctgcgccgcgagtggatttactttcagccgatatggg
atgagttgggtgcggcaagctcccgggaagaggctggaatgggtctcaacaatctccggggggggcacttacatctattac
cccgactcagtcaaggggagatttaccatttcacgagacaacgctaagaataccctgtatttgcagatgaattctctgaga
gcagaggacacagctgtttactattgtacccgcgacaactatggcaggaactacgactacggtatggactattggggacaa
gggacattggttacagtgagcagtggcggcgggggcagcggaggaggaggcagcggtggcggaggcagcgagatagtgctc
acgcagtcacccgcgactctcagtctctcacctggggaacgagctaccctgacgtgctctgctacctcctcagtgtcatat
attcactggtatcagcaacggcccgggcagtcccctagattgctcatttatagtacctctaatctggcctcaggtatccct
gcacgattttctggatctggttcaggttctgattacaccctcactatctctagcctggagcctgaagactttgccgtttat
tactgccagcagaggtctagctccccattcacctttgggagtgggaccaaggttgaaattaaagagtctccaaaggcaca
ggcctcctcagtgcccactgcacaaccccaagcagagggcagcctcgccaaggcaaccacagccccagccaccacccgta
acacaggaagaggcggcgaagagaagaaaaaggagaaggagaaagaggaacaagaagagagagagacaaagacaccaatg
gccctgattgtgctggggggcgtcgccggcctcctgcttttcattgggctaggcatcttcttcaaaaggggccgcaaaaaa
ctcctttacatttttaagcagccttttatgaggccagtacagacgactcaagaggaagacgggtgctcatgccgctttcct
gaggaggaggaaggagggtgcgaactgcgcgttaagttctcccgatcagccgacgcgcctgcttacaagcagggccagaac
caactgtacaacgagctgaatctcggtagacgggaagagtacgacgtgttggacaaacggagaggccgcgacccagaaatg
ggcggcaagcctcgcaggaaaaacccccaggagggactgtacaatgagttgcagaaagataagatggcagaagcttatagc
gagatcggaatgaagggggaaaggagacgagggaaaggacacgacggcctttatcagggcctgtccacagcaacaaaagat
acgtatgacgccctccatatgcaggcacttccaccacggtgataa
(amino acids)
(SEQ ID NO: 328)
MALPVTALLLPLALLLHAARPEVQLVESGGGLVKPGGSLRLSCAASGFTFSRYGMSWVRQAPGKRLEWVSTISGGGTYIY
YPDSVKGRFTISRDNAKNTLYLQMNSLRAEDTAVYYCTRDNYGRNYDYGMDYWGQGTLVTVSSGGGGSGGGGSGGGGSEI
VLTQSPATLSLSPGERATLTCSATSSVSYIHWYQQRPGQSPRLLIYSTSNLASGIPARFSGSGSGSDYTLTISSLEPEDF
AVYYCQQRSSSPFTFGSGTKVEIKESPKAQASSVPTAQPQAEGSLAKATTAPATTRNTGRGGEEKKKEKEKEEQEERETK
TPMALIVLGGVAGLLLFIGLGIFFKRGRKKLLYIFKQPFMRPVQTTQEEDGCSCRFPEEEEGGCELRVKFSRSADAPAYK
QGQNQLYNELNLGRREEYDVLDKRRGRDPEMGGKPRRKNPQEGLYNELQKDKMAEAYSEIGMKGERRRGKGHDGLYQGLS
TATKDTYDALHMQALPPR**
E6 CAR IgD4 pcDH gBLOCK sequence:
(DNA)
(SEQ ID NO: 329)
agtacctctaatctggcctcaggtatccctgcacgattttctggatctggttcaggttctgattacaccctcactatctct
agcctggagcctgaagactttgccgtttattactgccagcagaggtctagctccccattcacctttgggagtgggaccaag
gttgaaattaaagagtctccaaaggcacaggcctcctcagtgcccactgcacaaccccaagcagagggcagcctcgccaa
ggcaaccacagccccagccaccacccgtaacacaggaagaggcggcgaagagaagaaaaaggagaaggagaaagaggaac
aagaagagagagagacaaagacaccaatggccctgattgtgctggggggcgtcgccggcctcctgcttttcattgggcta
ggcatcttcttcaaaaggggccgcaaaaaactcctttacatttttaagcagccttttatgaggccag
CAR E6 X4/8/4-1BB/CD3z sequence:
N-CD81s-huMNE6scFv-X4 linker-CD8 transmembrane-4-1BB-CD3zeta-C
(DNA)
(SEQ ID NO: 330)
atggccctgcccgtgaccgctttgctgctccccctggcgctgctgctgcacgccgccaggccagaggtccagctggttgag
agtggcggtgggctggttaagcctggcggctccctgcggctgagctgcgccgcgagtggatttactttcagccgatatggg
atgagttgggtgcggcaagctcccgggaagaggctggaatgggtctcaacaatctccggggggggcacttacatctattac
cccgactcagtcaaggggagatttaccatttcacgagacaacgctaagaataccctgtatttgcagatgaattctctgaga
gcagaggacacagctgtttactattgtacccgcgacaactatggcaggaactacgactacggtatggactattggggacaa
gggacattggttacagtgagcagtggcggcgggggcagcggaggaggaggcagcggtggcggaggcagcgagatagtgctc
acgcagtcacccgcgactctcagtctctcacctggggaacgagctaccctgacgtgctctgctacctcctcagtgtcatat
attcactggtatcagcaacggcccgggcagtcccctagattgctcatttatagtacctctaatctggcctcaggtatccct
gcacgattttctggatctggttcaggttctgattacaccctcactatctctagcctggagcctgaagactttgccgtttat
tactgccagcagaggtctagctccccattcacctttgggagtgggaccaaggttgaaattaaagacaagacgcacaccaag
ccacctaaaccagctccagaactgctcggaggtcctggcaccggaaccggaggacctaccatcaaaccacctaagccacct
aagcctgctcctaacctgctcggaggacctatctacatttgggccccgctcgcaggcacatgtggagtgctcctcctctcc
ctggtgattaccctgtactgcaaaaggggccgcaaaaaactcctttacatttttaagcagccttttatgaggccagtacag
acgactcaagaggaagacgggtgctcatgccgctttcctgaggaggaggaaggagggtgcgaactgcgcgttaagttctcc
cgatcagccgacgcgcctgcttacaagcagggccagaaccaactgtacaacgagctgaatctcggtagacgggaagagtac
gacgtgttggacaaacggagaggccgcgacccagaaatgggcggcaagcctcgcaggaaaaacccccaggagggactgtac
aatgagttgcagaaagataagatggcagaagcttatagcgagatcggaatgaagggggaaaggagacgagggaaaggacac
gacggcctttatcagggcctgtccacagcaacaaaagatacgtatgacgccctccatatgcaggcacttccaccacggtga
taa
(amino acids)
(SEQ ID NO: 331)
MALPVTALLLPLALLLHAARPEVQLVESGGGLVKPGGSLRLSCAASGFTFSRYGMSWVRQAPGKRLEWVSTISGGGTYIY
YPDSVKGRFTISRDNAKNTLYLQMNSLRAEDTAVYYCTRDNYGRNYDYGMDYWGQGTLVTVSSGGGGSGGGGSGGGGSEI
VLTQSPATLSLSPGERATLTCSATSSVSYIHWYQQRPGQSPRLLIYSTSNLASGIPARFSGSGSGSDYTLTISSLEPEDF
AVYYCQQRSSSPFTFGSGTKVEIKDKTHTKPPKPAPELLGGPGTGTGGPTIKPPKPPKPAPNLLGGPIYIWAPLAGTCGV
LLLSLVITLYCKRGRKKLLYIFKQPFMRPVQTTQEEDGCSCRFPEEEEGGCELRVKFSRSADAPAYKQGQNQLYNELNLG
RREEYDVLDKRRGRDPEMGGKPRRKNPQEGLYNELQKDKMAEAYSEIGMKGERRRGKGHDGLYQGLSTATKDTYDALHMQ
ALPPR**
E6 CAR X48 pCDH gBLOCK sequence:
(DNA)
(SEQ ID NO: 332)
agtacctctaatctggcctcaggtatccctgcacgattttctggatctggttcaggttctgattacaccctcactatctct
agcctggagcctgaagactttgccgtttattactgccagcagaggtctagctccccattcacctttgggagtgggaccaag
gttgaaattaaagacaagacgcacaccaagccacctaaaccagctccagaactgctcggaggtcctggcaccggaaccgga
ggacctaccatcaaaccacctaagccacctaagcctgctcctaacctgctcggaggacctatctacatttgggccccgctc
gcaggcacatgtggagtgctcctcctctccctggtgattaccctgtactgcaaaaggggccgcaaaaaactcctttacatt
tttaagcagccttttatgaggccag
CAR E6 X4/4/4-1BB/CD3z sequence:
N-CD8ls-huMNE6scFv-X4 linker-CD4 transmembrane-4-1BB-CD3zeta-C
(DNA)
(SEQ ID NO: 333)
atggccctgcccgtgaccgctttgctgctccccctggcgctgctgctgcacgccgccaggccagaggtccagctggttgag
agtggcggtgggctggttaagcctggcggctccctgcggctgagctgcgccgcgagtggatttactttcagccgatatggg
atgagttgggtgcggcaagctcccgggaagaggctggaatgggtctcaacaatctccggggggggcacttacatctattac
cccgactcagtcaaggggagatttaccatttcacgagacaacgctaagaataccctgtatttgcagatgaattctctgaga
gcagaggacacagctgtttactattgtacccgcgacaactatggcaggaactacgactacggtatggactattggggacaa
gggacattggttacagtgagcagtggcggcgggggcagcggaggaggaggcagcggtggcggaggcagcgagatagtgctc
acgcagtcacccgcgactctcagtctctcacctggggaacgagctaccctgacgtgctctgctacctcctcagtgtcatat
attcactggtatcagcaacggcccgggcagtcccctagattgctcatttatagtacctctaatctggcctcaggtatccct
gcacgattttctggatctggttcaggttctgattacaccctcactatctctagcctggagcctgaagactttgccgtttat
tactgccagcagaggtctagctccccattcacctttgggagtgggaccaaggttgaaattaaagacaagacgcacaccaag
ccacctaaaccagctccagaactgctcggaggtcctggcaccggaaccggaggacctaccatcaaaccacctaagccacct
aagcctgctcctaacctgctcggaggacctatggccctgattgtgctggggggcgtcgccggcctcctgcttttcattggg
ctaggcatcttcttcaaaaggggccgcaaaaaactcctttacatttttaagcagccttttatgaggccagtacagacgact
caagaggaagacgggtgctcatgccgctttcctgaggaggaggaaggagggtgcgaactgcgcgttaagttctcccgatca
gccgacgcgcctgcttacaagcagggccagaaccaactgtacaacgagctgaatctcggtagacgggaagagtacgacgtg
ttggacaaacggagaggccgcgacccagaaatgggcggcaagcctcgcaggaaaaacccccaggagggactgtacaatgag
ttgcagaaagataagatggcagaagcttatagcgagatcggaatgaagggggaaaggagacgagggaaaggacacgacggc
ctttatcagggcctgtccacagcaacaaaagatacgtatgacgccctccatatgcaggcacttccaccacggtgataa
(amino acids)
(SEQ ID NO: 334)
MALPVTALLLPLALLLHAARPEVQLVESGGGLVKPGGSLRLSCAASGFTFSRYGMSWVRQAPGKRLEWVSTISGGGTYIY
YPDSVKGRFTISRDNAKNTLYLQMNSLRAEDTAVYYCTRDNYGRNYDYGMDYWGQGTLVTVSSGGGGSGGGGSGGGGSEI
VLTQSPATLSLSPGERATLTCSATSSVSYIHWYQQRPGQSPRLLIYSTSNLASGIPARFSGSGSGSDYTLTISSLEPEDF
AVYYCQQRSSSPFTFGSGTKVEIKDKTHTKPPKPAPELLGGPGTGTGGPTIKPPKPPKPAPNLLGGPMALIVLGGVAGLL
LFIGLGIFFKRGRKKLLYIFKQPFMRPVQTTQEEDGCSCRFPEEEEGGCELRVKFSRSADAPAYKQGQNQLYNELNLGRR
EEYDVLDKRRGRDPEMGGKPRRKNPQEGLYNELQKDKMAEAYSEIGMKGERRRGKGHDGLYQGLSTATKDTYDALHMQAL
PPR**
E6 CAR X44 pCDH gBLOCK sequence:
(DNA)
(SEQ ID NO: 335)
agtacctctaatctggcctcaggtatccctgcacgattttctggatctggttcaggttctgattacaccctcactatctct
agcctggagcctgaagactttgccgtttattactgccagcagaggtctagctccccattcacctttgggagtgggaccaag
gttgaaattaaagacaagacgcacaccaagccacctaaaccagctccagaactgctcggaggtcctggcaccggaaccgga
ggacctaccatcaaaccacctaagccacctaagcctgctcctaacctgctcggaggacctatggccctgattgtgctgggg
ggcgtcgccggcctcctgcttttcattgggctaggcatcttcttcaaaaggggccgcaaaaaactcctttacatttttaag
cagccttttatgaggccag
CAR E6 8+4/4/4-1BB/CD3z sequence:
N-CD81s-huMNE6scFv-CD8ecd + CD4ecd fragment-CD4 transmembrane-4-1BB-CD3zeta-C
(DNA)
(SEQ ID NO: 336)
atggccctgcccgtgaccgctttgctgctccccctggcgctgctgctgcacgccgccaggccagaggtccagctggttgag
agtggcggtgggctggttaagcctggcggctccctgcggctgagctgcgccgcgagtggatttactttcagccgatatggg
atgagttgggtgcggcaagctcccgggaagaggctggaatgggtctcaacaatctccggggggggcacttacatctattac
cccgactcagtcaaggggagatttaccatttcacgagacaacgctaagaataccctgtatttgcagatgaattctctgaga
gcagaggacacagctgtttactattgtacccgcgacaactatggcaggaactacgactacggtatggactattggggacaa
gggacattggttacagtgagcagtggcggcgggggcagcggaggaggaggcagcggtggcggaggcagcgagatagtgctc
acgcagtcacccgcgactctcagtctctcacctggggaacgagctaccctgacgtgctctgctacctcctcagtgtcatat
attcactggtatcagcaacggcccgggcagtcccctagattgctcatttatagtacctctaatctggcctcaggtatccct
gcacgattttctggatctggttcaggttctgattacaccctcactatctctagcctggagcctgaagactttgccgtttat
tactgccagcagaggtctagctccccattcacctttgggagtgggaccaaggttgaaattaaaacgacaaccccggccccc
agaccaccaacgccagcccccaccatcgccagccaacccctgtctctgagaccagaagcctgtaggcctgccgccggtgga
gctgtgcacacaagaggactggatttcgcctgtgatatggccctgattgtgctggggggcgtcgccggcctcctgcttttc
attgggctaggcatcttcttcaaaaggggccgcaaaaaactcctttacatttttaagcagccttttatgaggccagtacag
acgactcaagaggaagacgggtgctcatgccgctttcctgaggaggaggaaggagggtgcgaactgcgcgttaagttctcc
cgatcagccgacgcgcctgcttacaagcagggccagaaccaactgtacaacgagctgaatctcggtagacgggaagagtac
gacgtgttggacaaacggagaggccgcgacccagaaatgggcggcaagcctcgcaggaaaaacccccaggagggactgtac
aatgagttgcagaaagataagatggcagaagcttatagcgagatcggaatgaagggggaaaggagacgagggaaaggacac
gacggcctttatcagggcctgtccacagcaacaaaagatacgtatgacgccctccatatgcaggcacttccaccacggtga
taa
(amino acids)
(SEQ ID NO: 337)
MALPVTALLLPLALLLHAARPEVQLVESGGGLVKPGGSLRLSCAASGFTFSRYGMSWVRQAPGKRLEWVSTISGGGTYIY
YPDSVKGRFTISRDNAKNTLYLQMNSLRAEDTAVYYCTRDNYGRNYDYGMDYWGQGTLVTVSSGGGGSGGGGSGGGGSEI
VLTQSPATLSLSPGERATLTCSATSSVSYIHWYQQRPGQSPRLLIYSTSNLASGIPARFSGSGSGSDYTLTISSLEPEDF
AVYYCQQRSSSPFTFGSGTKVEIKTTTPAPRPPTPAPTIASQPLSLRPEACRPAAGGAVHTRGLDFACDMALIVLGGVAG
LLLFIGLGIFFKRGRKKLLYIFKQPFMRPVQTTQEEDGCSCRFPEEEEGGCELRVKFSRSADAPAYKQGQNQLYNELNLG
RREEYDVLDKRRGRDPEMGGKPRRKNPQEGLYNELQKDKMAEAYSEIGMKGERRRGKGHDGLYQGLSTATKDTYDALHMQ
ALPPR**
E6 CAR CD844 pCDH gBLOCK sequence:
(DNA)
(SEQ ID NO: 338)
agtacctctaatctggcctcaggtatccctgcacgattttctggatctggttcaggttctgattacaccctcactatctct
agcctggagcctgaagactttgccgtttattactgccagcagaggtctagctccccattcacctttgggagtgggaccaag
gttgaaattaaaacgacaaccccggcccccagaccaccaacgccagcccccaccatcgccagccaacccctgtctctgaga
ccagaagcctgtaggcctgccgccggtggagctgtgcacacaagaggactggatttcgcctgtgatatggccctgattgtg
ctggggggcgtcgccggcctcctgcttttcattgggctaggcatcttcttcaaaaggggccgcaaaaaactcctttacatt
tttaagcagccttttatgaggccag
Humanized C2 scFV sequence in CAR:
(DNA)
(SEQ ID NO: 339)
gagggccaccatggccttgccagtgacggccctgctgctgccattggctcttctgttgcacgctgccaggcctgaagtgca
gctcgtagagagtggcgggggactggtgaagcccggtggaagcctcagactcagttgcgccgcctcaggtttcactttttc
aggttacgccatgtcctgggtaagacaggcaccggggaaaggactcgagtgggtgtctactatcagctcaggaggcactta
tatatattatcctgactctgtaaaaggccgatttacgatttctcgcgacaatgcaaagaactccctctacctccaaatgaa
cagtcttagggcagaagacactgctgtatactattgtgcacgcctcggcggcgacaactactacgagtactttgacgtgtg
ggggaaagggactaccgtgacagtttcaagcggaggaggtggctcaggtggaggcgggtcaggggggggaggaagtgatat
tgtgctcacacaatccccagcctccctggctgtgtctcccggccaacgcgctacaattacatgtcgggcctccaaaagcgt
gagcaccagcggctacagctacatgcactggtatcaacagaaaccaggacaaccccccaaactgttgatttatctcgcttc
aaacttggagtccggcgtgcctgcgcgcttttcagggagtgggagcggcacagattttacgctgactatcaaccccgtaga
agcaaacgatacagcgaattattattgtcaacattcccgggaactcccctttacgttcggcgggggcacaaaggtcgaaat
taagagaacc
(amino acids)
(SEQ ID NO: 340)
EVQLVESGGGLVKPGGSLRLSCAASGFTFSGYAMSWVRQAPGKGLEWVSTISSGGTYIYYPDSVKGRFTISRDNAKNSLY
LQMNSLRAEDTAVYYCARLGGDNYYEYFDVWGKGTTVTVSSGGGGSGGGGSGGGGSDIVLTQSPASLAVSPGQRATITCR
ASKSVSTSGYSYMHWYQQKPGQPPKLLIYLASNLESGVPARFSGSGSGTDFTLTINPVEANDTANYYCQHSRELPFTFGG
GTKVEIKRT
Humanized E6 scFV sequence in CAR:
(DNA)
(SEQ ID NO: 341)
gaggtccagctggttgagagtggcggtgggctggttaagcctggcggctccctgcggctgagctgcgccgcgagtggattt
actttcagccgatatgggatgagttgggtgcggcaagctcccgggaagaggctggaatgggtctcaacaatctccgggggg
ggcacttacatctattaccccgactcagtcaaggggagatttaccatttcacgagacaacgctaagaataccctgtatttg
cagatgaattctctgagagcagaggacacagctgtttactattgtacccgcgacaactatggcaggaactacgactacggt
atggactattggggacaagggacattggttacagtgagcagtggcggcgggggcagcggaggaggaggcagcggtgggggg
ggcagcgagatagtgctcacgcagtcacccgcgactctcagtctctcacctggggaacgagctaccctgacgtgctctgct
acctcctcagtgtcatatattcactggtatcagcaacggcccgggcagtcccctagattgctcatttatagtacctctaat
ctggcctcaggtatccctgcacgattttctggatctggttcaggttctgattacaccctcactatctctagcctggagcct
gaagactttgccgtttattactgccagcagaggtctagctccccattcacctttgggagtgggaccaaggttgaaattaaa
(amino acids)
(SEQ ID NO: 342)
EVQLVESGGGLVKPGGSLRLSCAASGFTFSRYGMSWVRQAPGKRLEWVSTISGGGTYIYYPDSVKGRFTISRDNAKNTLY
LQMNSLRAEDTAVYYCTRDNYGRNYDYGMDYWGQGTLVTVSSGGGGSGGGGSGGGGSEIVLTQSPATLSLSPGERATLTC
SATSSVSYIHWYQQRPGQSPRLLIYSTSNLASGIPARFSGSGSGSDYTLTISSLEPEDFAVYYCQQRSSSPFTFGSGTKV
EIK
CD8 leader sequence:
(DNA)
(SEQ ID NO: 343)
atggccctgcccgtgaccgctttgctgctccccctggcgctgctgctgcacgccgccaggcca
(amino acids)
(SEQ ID NO: 344)
MALPVTALLLPLALLLHAARP
CD8 hinge domain sequence:
(DNA)
(SEQ ID NO: 345)
acgacaaccccggcccccagaccaccaacgccagcccccaccatcgccagccaacccctgtctctgagaccagaagcctgt
aggcctgccgccggtggagctgtgcacacaagaggactggatttcgcctgtgat
(amino acids)
(SEQ ID NO: 346)
TTTPAPRPPTPAPTIASQPLSLRPEACRPAAGGAVHTRGLDFACD
CD4 hinge domain sequence:
(DNA)
(SEQ ID NO: 347)
tcgggacaggtcctgctggaatccaacatcaaggttctgcccacatggtccaccccggtgcagcca
(amino acids)
(SEQ ID NO: 348)
SGQVLLESNIKVLPTWSTPVQP
CD28 hinge domain sequence:
(DNA)
(SEQ ID NO: 349)
aaacacctttgtccaagtcccctatttcccggaccttctaagccc
(amino acids)
(SEQ ID NO: 350)
KHLCPSPLFPGPSKP
CD8+CD4 hinge domain sequence:
(DNA)
(SEQ ID NO: 351)
acgacaaccccggcccccagaccaccaacgccagcccccaccatcgccagccaacccctgtctctgagaccagaagcctgt
aggcctgccgccggtggagctgtgcacacaagaggactggatttcgcctgtgattcgggacaggtcctgctggaatccaac
atcaaggttctgcccacatggtccaccccggtgcagcca
(amino acids)
(SEQ ID NO: 352)
TTTPAPRPPTPAPTIASQPLSLRPEACRPAAGGAVHTRGLDFACDSGQVLLESNIKVLPTWSTPVQP
CD8+CD28 hinge domain sequence:
(DNA)
(SEQ ID NO: 353)
acgacaaccccggcccccagaccaccaacgccagcccccaccatcgccagccaacccctgtctctgagaccagaagcctgt
aggcctgccgccggtggagctgtgcacacaagaggactggatttcgcctgtgataaacacctttgtccaagtcccctatt
tcccggaccttctaagccc
(amino acids)
(SEQ ID NO: 354)
TTTPAPRPPTPAPTIASQPLSLRPEACRPAAGGAVHTRGLDFACDKHLCPSPLFPGPSKP
CD28+CD4 hinge domain sequence:
(DNA)
(SEQ ID NO: 355)
aaacacctttgtccaagtcccctatttcccggaccttctaagccctcgggacaggtcctgctggaatccaacatcaaggt
tctgcccacatggtccaccccggtgcagcca
(amino acids)
(SEQ ID NO: 356)
KHLCPSPLFPGPSKPSGQVLLESNIKVLPTWSTPVQP
Human IgD hinge domain sequence:
(DNA)
(SEQ ID NO: 357)
gagtctccaaaggcacaggcctcctcagtgcccactgcacaaccccaagcagagggcagcctcgccaaggcaaccacagc
cccagccaccacccgtaacacaggaagaggcggcgaagagaagaaaaaggagaaggagaaagaggaacaagaagagagag
agacaaagacacca
(amino acids)
(SEQ ID NO: 358)
ESPKAQASSVPTAQPQAEGSLAKATTAPATTRNTGRGGEEKKKEKEKEEQEERETKTP
X4 linker (IgG1 and IgG2 modified hinge region) sequence:
(DNA)
(SEQ ID NO: 359)
gacaagacgcacaccaagccacctaaaccagctccagaactgctcggaggtcctggcaccggaaccggaggacctaccatc
aaaccacctaagccacctaagcctgctcctaacctgctcggaggacct
(amino acids)
(SEQ ID NO: 360)
DKTHTKPPKPAPELLGGPGTGTGGPTIKPPKPPKPAPNLLGGP
CD3 zeta transmembrane domain sequence:
(DNA)
(SEQ ID NO: 361)
ctctgctacctgctggatggaatcctcttcatctatggtgtcattctcactgccttgttcctg
(amino acids)
(SEQ ID NO: 362)
LCYLLDGILFIYGVILTALFL
CD8 transmembrane domain sequence:
(DNA)
(SEQ ID NO: 363)
atctacatttgggccccgctcgcaggcacatgtggagtgctcctcctctccctggtgattaccctgtactgc
(amino acids)
(SEQ ID NO: 364)
IYIWAPLAGTCGVLLLSLVITLYC
CD4 transmembrane domain sequence:
(DNA)
(SEQ ID NO: 365)
atggccctgattgtgctggggggcgtcgccggcctcctgcttttcattgggctaggcatcttcttc
(amino acids)
(SEQ ID NO: 366)
MALIVLGGVAGLLLFIGLGIFF
CD28 transmembrane domain sequence:
(DNA)
(SEQ ID NO: 367)
ttttgggtgctggtggtggttggtggagtcctggcttgctatagcttgctagtaacagtggcctttattattttctgggt
g
(amino acids)
(SEQ ID NO: 368)
FWVLVVVGGVLACYSLLVTVAFIIFWV
4-1BB transmembrane domain sequence:
(DNA)
(SEQ ID NO: 369)
atcatctccttctttcttgcgctgacgtcgactgcgttgctcttcctgctgttcttcctcacgctccgtttctctgttgt
t
(amino acids)
(SEQ ID NO: 370)
IISFFLALTSTALLFLLFFLTLRFSVV
OX40 transmembrane domain sequence:
(DNA)
(SEQ ID NO: 371)
gttgccgccatcctgggcctgggcctggtgctggggctgctgggccccctggccatcctgctggccctgtacctgctc
(amino acids)
(SEQ ID NO: 372)
VAAILGLGLVLGLLGPLAILLALYLL
CD3 zeta domain sequence:
(DNA)
(SEQ ID NO: 373)
cgcgttaagttctcccgatcagccgacgcgcctgcttacaagcagggccagaaccaactgtacaacgagctgaatctcggt
agacgggaagagtacgacgtgttggacaaacggagaggccgcgacccagaaatgggcggcaagcctcgcaggaaaaacccc
caggagggactgtacaatgagttgcagaaagataagatggcagaagcttatagcgagatcggaatgaagggggaaaggaga
cgagggaaaggacacgacggcctttatcagggcctgtccacagcaacaaaagatacgtatgacgccctccatatgcaggca
cttccaccacgg
(amino acids)
(SEQ ID NO: 374)
RVKFSRSADAPAYKQGQNQLYNELNLGRREEYDVLDKRRGRDPEMGGKPRRKNPQEGLYNELQKDKMAEAYSEIGMKGERR
RGKGHDGLYQGLSTATKDTYDALHMQALPPR
CD3 zeta domain variant sequence:
(DNA)
(SEQ ID NO: 375)
agagtgaagttcagcaggagcgcagacgcccccgcgtaccagcagggccagaaccagctctataacgagctcaatctagg
acgaagagaggagtacgatgttttggacaagagacgtggccgggaccctgagatggggggaaagccgagaaggaagaacc
ctcaggaaggcctgtacaatgaactgcagaaagataagatggcggaggcctacagtgagattgggatgaaaggcgagcgc
cggaggggcaaggggcacgatggcctttaccagggtctcagtacagccaccaaggacacctacgacgcccttcacatgca
ggccctgccccctcgc
(amino acids)
(SEQ ID NO: 376)
RVKFSRSADAPAYQQGQNQLYNELNLGRREEYDVLDKRRGRDPEMGGKPRRKNPQEGLYNELQKDKMAEAYSEIGMKGER
RRGKGHDGLYQGLSTATKDTYDALHMQALPPR
CD28 domain sequence:
(DNA)
(SEQ ID NO: 377)
agaagcaagcggtctcggctcctgcattctgattacatgaacatgaccccaagaagaccaggccccaccaggaaacattac
cagccctacgctccgccacgcgacttcgctgcctaccggtcc
(amino acids)
(SEQ ID NO: 378)
RSKRSRLLHSDYMNMTPRRPGPTRKHYQPYAPPRDFAAYRS
4-1BB domain sequence:
(DNA)
(SEQ ID NO: 379)
aaaaggggccgcaaaaaactcctttacatttttaagcagccttttatgaggccagtacagacgactcaagaggaagacggg
tgctcatgccgctttcctgaggaggaggaaggagggtgcgaactg
(amino acids)
(SEQ ID NO: 380)
KRGRKKLLYIFKQPFMRPVQTTQEEDGCSCRFPEEEEGGCEL
OX40 domain sequence:
(DNA)
(SEQ ID NO: 381)
cggagggaccagaggctgccccccgatgcccacaagccccctgggggaggcagtttccggacccccatccaagaggagcag
gccgacgcccactccaccctggccaagatc
(amino acids)
(SEQ ID NO: 382)
RRDQRLPPDAHKPPGGGSFRTPIQEEQADAHSTLAKI
Humanized anti CD3 scFV clone 12F6 (VH-VL) sequence:
(DNA)
(SEQ ID NO: 383)
caggtgcagctggtgcagagcggaggtggagtggtccaacctggaagatctctgagactgagctgtaaggctagcgggta
cacgttcacatcttacacgatgcactgggtgaggcaagcccccggtaagggcctggaatggatcggatatataaacccca
gctcagggtataccaaatataatcagaagttcaaagatcggttcacgatttctgctgataaaagtaagtccaccgctttc
ctgcagatggactcactcaggccagaagatactggtgtttatttctgtgcaaggtggcaggactacgacgtgtactttga
ctattgggggcaggggacgcctgtaacagtatcaagcggcggtggcggatccggcggtggcggatccggcggtggcggat
ccgatattcagatgacccagagcccgagcagcctgagcgcgagcgtgggcgatcgcgtgaccatgacctgccgcgcgagc
agcagcgtgagctatatgcattggtatcagcagaccccgggcaaagcgccgaaaccgtggatttatgcgaccagcaacct
ggcgagcggcgtgccgagccgctttagcggcagcggcagcggcaccgattataccctgaccattagcagcctgcagccgg
aagatattgcgacctattattgccagcagtggagcagcaacccgccgacctttggccagggcaccaaactgcagattacc
cgc
(amino acids)
(SEQ ID NO: 384)
QVQLVQSGGGVVQPGRSLRLSCKASGYTFTSYTMHWVRQAPGKGLEWIGYINPSSGYTKYNQKFKDRFTISADKSKSTAF
LQMDSLRPEDTGVYFCARWQDYDVYFDYWGQGTPVTVSSGGGGSGGGGSGGGGSDIQMTQSPSSLSASVGDRVTMTCRAS
SSVSYMHWYQQTPGKAPKPWIYATSNLASGVPSRFSGSGSGTDYTLTISSLQPEDIATYYCQQWSSNPPTFGQGTKLQIT
R
Humanized anti CD3 scFV clone 12F6 (VL-VH) sequence:
(DNA)
(SEQ ID NO: 385)
gatattcagatgacccagagcccgagcagcctgagcgcgagcgtgggcgatcgcgtgaccatgacctgccgcgcgagcag
cagcgtgagctatatgcattggtatcagcagaccccgggcaaagcgccgaaaccgtggatttatgcgaccagcaacctgg
cgagcggcgtgccgagccgctttagcggcagcggcagcggcaccgattataccctgaccattagcagcctgcagccggaa
gatattgcgacctattattgccagcagtggagcagcaacccgccgacctttggccagggcaccaaactgcagattacccg
cggcggtggcggatccggcggtggcggatccggcggtggcggatcccaggtgcagctggtgcagagcggaggtggagtgg
tccaacctggaagatctctgagactgagctgtaaggctagcgggtacacgttcacatcttacacgatgcactgggtgagg
caagcccccggtaagggcctggaatggatcggatatataaaccccagctcagggtataccaaatataatcagaagttcaa
agatcggttcacgatttctgctgataaaagtaagtccaccgctttcctgcagatggactcactcaggccagaagatactg
gtgtttatttctgtgcaaggtggcaggactacgacgtgtactttgactattgggggcaggggacgcctgtaacagtatca
agc
(amino acids)
(SEQ ID NO: 386)
DIQMTQSPSSLSASVGDRVTMTCRASSSVSYMHWYQQTPGKAPKPWIYATSNLASGVPSRFSGSGSGTDYTLTISSLQPE
DIATYYCQQWSSNPPTFGQGTKLQITRGGGGSGGGGSGGGGSQVQLVQSGGGVVQPGRSLRLSCKASGYTFTSYTMHWVR
QAPGKGLEWIGYINPSSGYTKYNQKFKDRFTISADKSKSTAFLQMDSLRPEDTGVYFCARWQDYDVYFDYWGQGTPVTVS
S
Humanized anti CD3 scFV clone OKT3 (VH-VL) sequence:
(DNA)
(SEQ ID NO: 387)
caggtgcagctggtgcagagcggaggcggagtggtgcagcctggaagaagcctgcgcctgagctgcaaagcgagcggcta
tacctttacccgctataccatgcattgggtgcgccaggcgccgggcaaaggcctggaatggattggctatattaacccga
gccgcggctataccaactataaccagaaagtgaaagatcgctttaccattagcaccgataaaagcaaaagcaccgcgttt
ctgcagatggatagcctgcgcccggaagataccgcggtgtattattgcgcgcgctattatgatgatcattattgcctgga
ttattggggccagggcaccaccctgaccgtgagcagcggcggtggcggatccggcggtggcggatccggcggtggcggat
ccgatattcagatgacccagagcccgagcagcctgagcgcgagcgtgggcgatcgcgtgaccattacctgcagcgcgagc
agcagcgtgagctatatgaactggtatcagcagaccccgggcaaagcgccgaaacgctggatttatgataccagcaaact
ggcgagcggcgtgccgagccgctttagcggcagcggcagcggcaccgattatacctttaccattagcagcctgcagccgg
aagatattgcgacctattattgccagcagtggagcagcaacccgtttacctttggccagggcaccaaactgcagattacc
cgc
(amino acids)
(SEQ ID NO: 388)
QVQLVQSGGGVVQPGRSLRLSCKASGYTFTRYTMHWVRQAPGKGLEWIGYINPSRGYTNYNQKVKDRFTISTDKSKSTAF
LQMDSLRPEDTAVYYCARYYDDHYCLDYWGQGTTLTVSSGGGGSGGGGSGGGGSDIQMTQSPSSLSASVGDRVTITCSAS
SSVSYMNWYQQTPGKAPKRWIYDTSKLASGVPSRFSGSGSGTDYTFTISSLQPEDIATYYCQQWSSNPFTFGQGTKLQIT
R
Humanized anti CD3 scFV clone OKT3 (VH-VL) sequence:
(DNA)
(SEQ ID NO: 389)
gatattcagatgacccagagcccgagcagcctgagcgcgagcgtgggcgatcgcgtgaccattacctgcagcgcgagcag
cagcgtgagctatatgaactggtatcagcagaccccgggcaaagcgccgaaacgctggatttatgataccagcaaactgg
cgagcggcgtgccgagccgctttagcggcagcggcagcggcaccgattatacctttaccattagcagcctgcagccggaa
gatattgcgacctattattgccagcagtggagcagcaacccgtttacctttggccagggcaccaaactgcagattacccg
cggcggtggcggatccggcggtggcggatccggcggtggcggatcccaggtgcagctggtgcagagcggaggcggagtgg
tgcagcctggaagaagcctgcgcctgagctgcaaagcgagcggctatacctttacccgctataccatgcattgggtgcgc
caggcgccgggcaaaggcctggaatggattggctatattaacccgagccgcggctataccaactataaccagaaagtgaa
agatcgctttaccattagcaccgataaaagcaaaagcaccgcgtttctgcagatggatagcctgcgcccggaagataccg
cggtgtattattgcgcgcgctattatgatgatcattattgcctggattattggggccagggcaccaccctgaccgtgagc
agc
(amino acids)
(SEQ ID NO: 390)
DIQMTQSPSSLSASVGDRVTITCSASSSVSYMNWYQQTPGKAPKRWIYDTSKLASGVPSRFSGSGSGTDYTFTISSLQPE
DIATYYCQQWSSNPFTFGQGTKLQITRGGGGSGGGGSGGGGSQVQLVQSGGGVVQPGRSLRLSCKASGYTFTRYTMHWVR
QAPGKGLEWIGYINPSRGYTNYNQKVKDRFTISTDKSKSTAFLQMDSLRPEDTAVYYCARYYDDHYCLDYWGQGTTLTVS
S
HumanizeE6 scFV (VH-VL) sequence:
(DNA)
(SEQ ID NO: 391)
gaggtgcagctggtggagtctgggggaggcctggtcaagcctggggggtccctgagactctcctgtgcagcctctggattc
accttcagtaggtatggcatgagctgggtccgccaggctccagggaagaggctggagtgggtctcaaccattagtggcgga
ggcacctacatatactacccagactcagtgaagggccgattcaccatctccagagacaacgccaagaacaccctgtatctg
caaatgaacagcctgagagccgaggacacggctgtgtattactgtaccagagataactatggccgcaactatgattatggc
atggattattggggccagggcaccctggtgaccgtgagcagcggcggtggcggatccggcggtggcggatccggcggtggc
ggatccgaaattgtgttgacacagtctccagccaccctgtctttgtctccaggggaaagagccaccctcacctgcagcgcc
accagcagtgttagctacatccactggtaccaacagaggcctggccagagccccaggctcctcatctatagcacctccaac
ctggccagcggcatcccagccaggttcagtggcagtgggtctgggagcgactacactctcaccatcagcagcctagagcct
gaagattttgcagtttattactgtcagcagcgtagcagctcccctttcacctttggcagcggcaccaaagtggaaattaaa
(amino acids)
(SEQ ID NO: 392)
EVQLVESGGGLVKPGGSLRLSCAASGFTFSRYGMSWVRQAPGKRLEWVSTISGGGTYIYYPDSVKGRFTISRDNAKNTLY
LQMNSLRAEDTAVYYCTRDNYGRNYDYGMDYWGQGTLVTVSSGGGGSGGGGSGGGGSEIVLTQSPATLSLSPGERATLTC
SATSSVSYIHWYQQRPGQSPRLLIYSTSNLASGIPARFSGSGSGSDYTLTISSLEPEDFAVYYCQQRSSSPFTFGSGTKV
EIK
HumanizeE6 scFV (VL-VH) sequence:
(DNA)
(SEQ ID NO: 393)
gaaattgtgttgacacagtctccagccaccctgtctttgtctccaggggaaagagccaccctcacctgcagcgccaccagc
agtgttagctacatccactggtaccaacagaggcctggccagagccccaggctcctcatctatagcacctccaacctggcc
agcggcatcccagccaggttcagtggcagtgggtctgggagcgactacactctcaccatcagcagcctagagcctgaagat
tttgcagtttattactgtcagcagcgtagcagctcccctttcacctttggcagcggcaccaaagtggaaattaaaggcggt
ggcggatccggcggtggcggatccggcggtggcggatccgaggtgcagctggtggagtctgggggaggcctggtcaagcct
ggggggtccctgagactctcctgtgcagcctctggattcaccttcagtaggtatggcatgagctgggtccgccaggctcca
gggaagaggctggagtgggtctcaaccattagtggcggaggcacctacatatactacccagactcagtgaagggccgattc
accatctccagagacaacgccaagaacaccctgtatctgcaaatgaacagcctgagagccgaggacacggctgtgtattac
tgtaccagagataactatggccgcaactatgattatggcatggattattggggccagggcaccctggtgaccgtgagcagc
(amino acids)
(SEQ ID NO: 394)
EIVLTQSPATLSLSPGERATLTCSATSSVSYIHWYQQRPGQSPRLLIYSTSNLASGIPARFSGSGSGSDYTLTISSLEPE
DFAVYYCQQRSSSPFTFGSGTKVEIKGGGGSGGGGSGGGGSEVQLVESGGGLVKPGGSLRLSCAASGFTFSRYGMSWVRQ
APGKRLEWVSTISGGGTYIYYPDSVKGRFTISRDNAKNTLYLQMNSLRAEDTAVYYCTRDNYGRNYDYGMDYWGQGTLVT
VSS
HumanizeC2 scFV (VH-VL) sequence:
(DNA)
(SEQ ID NO: 395)
gaggtgcagctggtggagtctgggggaggcctggtcaagcctggggggtccctgagactctcctgtgcagcctctggattc
accttcagtggctatgccatgagctgggtccgccaggctccagggaaggggctggagtgggtctcaaccattagtagtggc
ggaacctacatatactaccccgactcagtgaagggccgattcaccatctccagagacaacgccaagaactcactgtatctg
caaatgaacagcctgagagccgaggacacggccgtgtattactgtgcgagacttgggggggataattactacgaatacttc
gatgtctggggcaaagggaccacggtcaccgtctcctccggcggtggcggatccggcggtggcggatccggcggtggcgga
tccgacattgtgctgacccagtctccagcctccttggccgtgtctccaggacagagggccaccatcacctgcagagccagt
aagagtgtcagtaccagcggatactcctacatgcactggtatcagcagaaaccaggacaacctcctaaactcctgatttac
ctggcatccaatctggagagcggggtcccagccaggttcagcggcagtgggtctgggaccgatttcaccctcacaattaat
cctgtggaagctaatgatactgcaaattattactgtcagcacagtagggagctgcctttcacattcggcggagggaccaag
gtggagatcaaacgaact
(amino acids)
(SEQ ID NO: 396)
EVQLVESGGGLVKPGGSLRLSCAASGFTFSGYAMSWVRQAPGKGLEWVSTISSGGTYIYYPDSVKGRFTISRDNAKNSLY
LQMNSLRAEDTAVYYCARLGGDNYYEYFDVWGKGTTVTVSSGGGGSGGGGSGGGGSDIVLTQSPASLAVSPGQRATITCR
ASKSVSTSGYSYMHWYQQKPGQPPKLLIYLASNLESGVPARFSGSGSGTDFTLTINPVEANDTANYYCQHSRELPFTFGG
GTKVEIKRT
HumanizeE6 scFV (VL-VH) sequence:
(DNA)
(SEQ ID NO: 397)
gacattgtgctgacccagtctccagcctccttggccgtgtctccaggacagagggccaccatcacctgcagagccagtaag
agtgtcagtaccagcggatactcctacatgcactggtatcagcagaaaccaggacaacctcctaaactcctgatttacctg
gcatccaatctggagagcggggtcccagccaggttcagcggcagtgggtctgggaccgatttcaccctcacaattaatcct
gtggaagctaatgatactgcaaattattactgtcagcacagtagggagctgcctttcacattcggcggagggaccaaggtg
gagatcaaacgaactggcggtggcggatccggcggtggcggatccggcggtggcggatccgaggtgcagctggtggagtct
gggggaggcctggtcaagcctggggggtccctgagactctcctgtgcagcctctggattcaccttcagtggctatgccatg
agctgggtccgccaggctccagggaaggggctggagtgggtctcaaccattagtagtggcggaacctacatatactacccc
gactcagtgaagggccgattcaccatctccagagacaacgccaagaactcactgtatctgcaaatgaacagcctgagagcc
gaggacacggccgtgtattactgtgcgagacttgggggggataattactacgaatacttcgatgtctggggcaaagggacc
acggtcaccgtctcctcc
(amino acids)
(SEQ ID NO: 398)
DIVLTQSPASLAVSPGQRATITCRASKSVSTSGYSYMHWYQQKPGQPPKLLIYLASNLESGVPARFSGSGSGTDFTLTIN
PVEANDTANYYCQHSRELPFTFGGGTKVEIKRTGGGGSGGGGSGGGGSEVQLVESGGGLVKPGGSLRLSCAASGFTFSGY
AMSWVRQAPGKGLEWVSTISSGGTYIYYPDSVKGRFTISRDNAKNSLYLQMNSLRAEDTAVYYCARLGGDNYYEYFDVWG
KGTTVTVSS
G4S1 linker sequence:
(DNA)
(SEQ ID NO: 399)
ggcggtggcggatcc
(amino acids)
(SEQ ID NO: 400)
GGGGS
[G4S1]x3 linker sequence:
(DNA)
(SEQ ID NO: 401)
ggcggtggcggatccggcggtggcggatccggcggtggcggatcc
(amino acids)
(SEQ ID NO: 402)
GGGGSGGGGSGGGGS
8 aa GS linker sequence:
(DNA)
(SEQ ID NO: 403)
ggcggttccggcggtggatccgga
(amino acids)
(SEQ ID NO: 404)
GGSGGGSG
12 aa GS linker sequence:
(DNA)
(SEQ ID NO: 405)
ggcggttccggcggtggatccggcggtggcggatccgga
(amino acids)
(SEQ ID NO: 406)
GGSGGGSGGGSG
13 aa GS linker sequence:
(DNA)
(SEQ ID NO: 407)
ggcggtggatccggcggtggcggatccggcggtggatcc
(amino acids)
(SEQ ID NO: 408)
GGGSGGGGSGGGS
22 aa GS linker sequence:
(DNA)
(SEQ ID NO: 409)
ggcggtggaagcggcggtggcggatccggcagcggcggaagcggcggtggcggatccggcggtgga
(amino acids)
(SEQ ID NO: 4110)
GGGSGGGGSGSGGSGGGGSGGG
24 aa GS linker sequence:
(DNA)
(SEQ ID NO: 411)
ggcggttccggcggtggatccggcggtggcggatccggaggcggttccggcggtggatccggcggtggcggatccgga
(amino acids)
(SEQ ID NO: 412)
GGSGGGSGGGSGGGSGGGSGGGSG
Mouse C3 Heavy chain variable region sequence:
(DNA)
(SEQ ID NO: 413)
caggtccagctgcagcagtctgggcctgagctggtgaggcctggggtctcagtgaagatttcctgcaagggttccggctac
agattcactgattatgctatgaactgggtgaagcagagtcatgcaaagagtctagagtggattggagttattagtactttc
tctggtaatacaaacttcaaccagaagtttaagggcaaggccacaatgactgtagacaaatcctccagcacagcctatatg
gaacttgccagattgacatctgaggattctgccatgtattactgtgcaagatcggattactacggcccatactttgactac
tggggccaaggcaccactctcacagtctcctca
(amino acids)
(SEQ ID NO: 414)
QVQLQQSGPELVRPGVSVKISCKGSGYRFTDYAMNWVKQSHAKSLEWIGVISTFSGNTNFNQKFKGKATMTVDKSSSTAYM
ELARLTSEDSAMYYCARSDYYGPYFDYWGQGTTLTVSS
Mouse C3 heavy chain variable framework region 1 (FWR1) sequence:
(DNA)
(SEQ ID NO: 415)
caggtccagctgcagcagtctgggcctgagctggtgaggcctggggtctcagtgaagatttcctgcaagggttccggcta
cagattcact
(amino acids)
(SEQ ID NO: 416)
QVQLQQSGPELVRPGVSVKISCKGSGYRFT
Mouse C3 heavy chain variable complementarity determining regions 1 (CDR1)
sequence:
(DNA)
(SEQ ID NO: 417)
gattatgctatgaac
(amino acids)
(SEQ ID NO: 418)
DYAMN
Mouse C3 heavy chain variable framework region 2 (FWR2) sequence:
(DNA)
(SEQ ID NO: 419)
tgggtgaagcagagtcatgcaaagagtctagagtggattgga
(amino acids)
(SEQ ID NO: 420)
WVKQSHAKSLEWIG
Mouse C3 heavy chain variable complementarity determining regions 2 (CDR2)
sequence:
(DNA)
(SEQ ID NO: 421)
gttattagtactttctctggtaatacaaacttcaaccagaagtttaagggc
(amino acids)
(SEQ ID NO: 422)
VISTFSGNTNFNQKFKG
Mouse C3 heavy chain variable framework region 3 (FWR3) acid sequence:
(DNA)
(SEQ ID NO: 423)
aaggccacaatgactgtagacaaatcctccagcacagcctatatggaacttgccagattgacatctgaggattctgccat
gtattactgtgcaaga
(amino acids)
(SEQ ID NO: 424)
KATMTVDKSSSTAYMELARLTSEDSAMYYCAR
Mouse C3 heavy chain variable complementarity determining regions 3 (CDR3)
sequence:
(DNA)
(SEQ ID NO: 425)
tcggattactacggcccatactttgactac
(amino acids)
(SEQ ID NO: 426)
SDYYGPYFDY
IGHV1-18*04 heavy chain variable region sequence:
(DNA)
(SEQ ID NO: 427)
caggttcagctggtgcagtctggagctgaggtgaagaagcctggggcctcagtgaaggtctcctgcaaggcttctggttac
acctttaccagctacggtatcagctgggtgcgacaggcccctggacaagggcttgagtggatgggatggatcagcgcttac
aatggtaacacaaactatgcacagaagctccagggcagagtcaccatgaccacagacacatccacgagcacagcctacatg
gagctgaggagcctgagatctgacgacacggccgtgtattactgtgcgagaga
(amino acids)
(SEQ ID NO: 428)
QVQLVQSGAEVKKPGASVKVSCKASGYTFTSYGISWVRQAPGQGLEWMGWISAYNGNTNYAQKLQGRVTMTTDTSTSTAY
MELRSLRSDDTAVYYCAR
IGHV1-18*04 heavy chain variable framework region 1 (FWR1) sequence:
(DNA)
(SEQ ID NO: 429)
caggttcagctggtgcagtctggagctgaggtgaagaagcctggggcctcagtgaaggtctcctgcaaggcttctggtta
cacctttacc
(amino acids)
(SEQ ID NO: 430)
QVQLVQSGAEVKKPGASVKVSCKASGYTFT
IGHV1-18*04 heavy chain variable complementarity determining regions 1 (CDR1)
sequence:
(DNA)
(SEQ ID NO: 431)
agctacggtatcagc
(amino acids)
(SEQ ID NO: 432)
SYGIS
IGHV1-18*04 heavy chain variable framework region 2 (FWR2) sequence:
(DNA)
(SEQ ID NO: 433)
tgggtgcgacaggcccctggacaagggcttgagtggatggga
(amino acids)
(SEQ ID NO: 434)
WVRQAPGQGLEWMG
IGHV1-18*04 heavy chain variable complementarity determining regions 2 (CDR2)
sequence:
(DNA)
(SEQ ID NO: 435)
tggatcagcgcttacaatggtaacacaaactatgcacagaagctccagggc
(amino acids)
(SEQ ID NO: 436)
WISAYNGNTNYAQKLQG
IGHV1-18*04 heavy chain variable framework region 3 (FWR3) sequence:
(DNA)
(SEQ ID NO: 437)
agagtcaccatgaccacagacacatccacgagcacagcctacatggagctgaggagcctgagatctgacgacacggccgt
gtattactgtgcgaga
(amino acids)
(SEQ ID NO: 438)
RVTMTTDTSTSTAYMELRSLRSDDTAVYYCAR
Humanized C3 heavy chain variable region sequence:
(DNA)
(SEQ ID NO: 439)
caggttcagctggtgcagtctggagctgaggtgaagaagcctggggcctcagtgaaggtctcctgcaaggcttctggtta
cacctttaccgactacgccatgaactgggtgcgacaggcccctggacaagggcttgagtggatgggagtgatcagcacct
tcagcggtaacacaaacttcaaccagaagttcaagggcagagtcaccatgaccacagacacatccacgagcacagcctac
atggagctgaggagcctgagatctgacgacacggccgtgtattactgtgcgagaagcgactactacggcccatacttcga
ctactggggccagggcaccaccctgaccgtgtccagc
(amino acids)
(SEQ ID NO: 440)
QVQLVQSGAEVKKPGASVKVSCKASGYTFTDYAMNWVRQAPGQGLEWMGVISTFSGNTNFNQKFKGRVTMTTDTSTSTAY
MELRSLRSDDTAVYYCARSDYYGPYFDYWGQGTTLTVSS
Humanized C3 heavy chain variable framework region 1 (FWR1) acid sequence:
(DNA)
(SEQ ID NO: 441)
caggttcagctggtgcagtctggagctgaggtgaagaagcctggggcctcagtgaaggtctcctgcaaggcttctggtta
cacctttacc
(amino acids)
(SEQ ID NO: 442)
QVQLVQSGAEVKKPGASVKVSCKASGYTFT
Humanized C3 heavy chain variable complementarity determining regions 1 (CDR1)
sequence:
(DNA)
(SEQ ID NO: 443)
gactacgccatgaac
(amino acids)
(SEQ ID NO: 444)
DYAMN
Humanized C3 heavy chain variable framework region 2 (FWR2) acid sequence:
(DNA)
(SEQ ID NO: 445)
tgggtgcgacaggcccctggacaagggcttgagtggatggga
(amino acids)
(SEQ ID NO: 446)
WVRQAPGQGLEWMG
Humanized C3 heavy chain variable complementarity determining regions 2 (CDR2)
sequence:
(DNA)
(SEQ ID NO: 447)
gtgatcagcaccttcagcggtaacacaaacttcaaccagaagttcaagggc
(amino acids)
(SEQ ID NO: 448)
VISTESGNTNFNQKFKG
Humanized C3 heavy chain variable framework region 3 (FWR3) acid sequence:
(DNA)
(SEQ ID NO: 449)
agagtcaccatgaccacagacacatccacgagcacagcctacatggagctgaggagcctgagatctgacgacacggccgtg
tattactgtgcgaga
(amino acids)
(SEQ ID NO: 450)
RVTMTTDTSTSTAYMELRSLRSDDTAVYYCAR
Humanized C3 heavy chain variable complementarity determining regions 3 (CDR3)
sequence:
(DNA)
(SEQ ID NO: 451)
agcgactactacggcccatacttcgactac
(amino acids)
(SEQ ID NO: 452)
SDYYGPYFDY
Humanized C3 IgG1 heavy chain sequence
(DNA)
(SEQ ID NO: 453)
caggttcagctggtgcagtctggagctgaggtgaagaagcctggggcctcagtgaaggtctcctgcaaggcttctggttac
acctttaccgactacgccatgaactgggtgcgacaggcccctggacaagggcttgagtggatgggagtgatcagcaccttc
agcggtaacacaaacttcaaccagaagttcaagggcagagtcaccatgaccacagacacatccacgagcacagcctacatg
gagctgaggagcctgagatctgacgacacggccgtgtattactgtgcgagaagcgactactacggcccatacttcgactac
tggggccagggcaccaccctgaccgtgtccagcgctagcaccaagggcccatcggtcttccccctggcaccctcctccaag
agcacctctgggggcacagcggccctgggctgcctggtcaaggactacttccccgaaccggtgacggtgtcgtggaactca
ggcgccctgaccagcggcgtgcacaccttcccggctgtcctacagtcctcaggactctactccctcagcagcgtggtgaca
gtgccctccagcagcttgggcacccagacctacatctgcaacgtgaatcacaagcccagcaacaccaaggtggacaagaaa
gttgagcccaaatcttgtgacaaaactcacacatgcccaccgtgcccagcacctgaactcctggggggaccgtcagtcttc
ctcttccccccaaaacccaaggacaccctcatgatctcccggacccctgaggtcacatgcgtggtggtggacgtgagccac
gaagaccctgaggtcaagttcaactggtacgtggacggcgtggaggtgcataatgccaagacaaagccgcgggaggagcag
tacaacagcacgtaccgtgtggtcagcgtcctcaccgtcctgcaccaggactggctgaatggcaaggagtacaagtgcaag
gtctccaacaaagccctcccagcccccatcgagaaaaccatctccaaagccaaagggcagccccgagaaccacaggtgtac
accctgcccccatcccgggaggagatgaccaagaaccaggtcagcctgacctgcctggtcaaaggcttctatcccagcgac
atcgccgtggagtgggagagcaatgggcagccggagaacaactacaagaccacgcctcccgtgctggactccgacggctcc
ttcttcctctacagcaagctcaccgtggacaagagcaggtggcagcaggggaacgtcttctcatgctccgtgatgcatgag
gctctgcacaaccactacacgcagaagagcctctccctgtctccgggtaaatgataa
(amino acids)
(SEQ ID NO: 454)
QVQLVQSGAEVKKPGASVKVSCKASGYTFTDYAMNWVRQAPGQGLEWMGVISTFSGNTNFNQKFKGRVTMTTDTSTSTAY
MELRSLRSDDTAVYYCARSDYYGPYFDYWGQGTTLTVSSASTKGPSVFPLAPSSKSTSGGTAALGCLVKDYFPEPVTVSW
NSGALTSGVHTFPAVLQSSGLYSLSSVVTVPSSSLGTQTYICNVNHKPSNTKVDKKVEPKSCDKTHTCPPCPAPELLGGP
SVFLFPPKPKDTLMISRTPEVTCVVVDVSHEDPEVKENWYVDGVEVHNAKTKPREEQYNSTYRVVSVLTVLHQDWLNGKE
YKCKVSNKALPAPIEKTISKAKGQPREPQVYTLPPSREEMTKNQVSLTCLVKGFYPSDIAVEWESNGQPENNYKTTPPVL
DSDGSFFLYSKLTVDKSRWQQGNVFSCSVMHEALHNHYTQKSLSLSPGK**
Humanized C3 IgG2 heavy chain sequence
(DNA)
(SEQ ID NO: 455)
caggttcagctggtgcagtctggagctgaggtgaagaagcctggggcctcagtgaaggtctcctgcaaggcttctggttac
acctttaccgactacgccatgaactgggtgcgacaggcccctggacaagggcttgagtggatgggagtgatcagcaccttc
agcggtaacacaaacttcaaccagaagttcaagggcagagtcaccatgaccacagacacatccacgagcacagcctacatg
gagctgaggagcctgagatctgacgacacggccgtgtattactgtgcgagaagcgactactacggcccatacttcgactac
tggggccagggcaccaccctgaccgtgtccagcgcctccaccaagggcccatcggtcttccccctggcgccctgctccagg
agcacctccgagagcacagccgccctgggctgcctggtcaaggactacttccccgaaccggtgacggtgtcgtggaactca
ggcgctctgaccagcggcgtgcacaccttcccagctgtcctacagtcctcaggactctactccctcagcagcgtggtgacc
gtgccctccagcaacttcggcacccagacctacacctgcaacgtagatcacaagcccagcaacaccaaggtggacaagaca
gttgagcgcaaatgttgtgtcgagtgcccaccgtgcccagcaccacctgtggcaggaccgtcagtcttcctcttcccccca
aaacccaaggacaccctcatgatctcccggacccctgaggtcacgtgcgtggtggtggacgtgagccacgaagaccccgag
gtccagttcaactggtacgtggacggcgtggaggtgcataatgccaagacaaagccacgggaggagcagttcaacagcacg
ttccgtgtggtcagcgtcctcaccgttgtgcaccaggactggctgaacggcaaggagtacaagtgcaaggtctccaacaaa
ggcctcccagcccccatcgagaaaaccatctccaaaaccaaagggcagccccgagaaccacaggtgtacaccctgccccca
tcccgggaggagatgaccaagaaccaggtcagcctgacctgcctggtcaaaggcttctaccccagcgacatcgccgtggag
tgggagagcaatgggcagccggagaacaactacaagaccacacctcccatgctggactccgacggctccttcttcctctac
agcaagctcaccgtggacaagagcaggtggcagcaggggaacgtcttctcatgctccgtgatgcatgaggctctgcacaac
cactacacgcagaagagcctctccctgtctccgggtaaatagtaa
(amino acids)
(SEQ ID NO: 456)
QVQLVQSGAEVKKPGASVKVSCKASGYTFTDYAMNWVRQAPGQGLEWMGVISTFSGNTNFNQKFKGRVTMTTDTSTSTAY
MELRSLRSDDTAVYYCARSDYYGPYFDYWGQGTTLTVSSASTKGPSVFPLAPCSRSTSESTAALGCLVKDYFPEPVTVSW
NSGALTSGVHTFPAVLQSSGLYSLSSVVTVPSSNFGTQTYTCNVDHKPSNTKVDKTVERKCCVECPPCPAPPVAGPSVEL
FPPKPKDTLMISRTPEVTCVVVDVSHEDPEVQFNWYVDGVEVHNAKTKPREEQFNSTFRVVSVLTVVHQDWLNGKEYKCK
VSNKGLPAPIEKTISKTKGQPREPQVYTLPPSREEMTKNQVSLTCLVKGFYPSDIAVEWESNGQPENNYKTTPPMLDSDG
SFFLYSKLTVDKSRWQQGNVFSCSVMHEALHNHYTQKSLSLSPGK**
Humanized C3 heavy chain IgG1 gBLOCK sequence:
(DNA)
(SEQ ID NO: 457)
tgctctgggttccaggttccactggtgacgcggcccagccggcccaggttcagctggtgcagtctggagctgaggtgaaga
agcctggggcctcagtgaaggtctcctgcaaggcttctggttacacctttaccgactacgccatgaactgggtgcgacagg
cccctggacaagggcttgagtggatgggagtgatcagcaccttcagcggtaacacaaacttcaaccagaagttcaagggca
gagtcaccatgaccacagacacatccacgagcacagcctacatggagctgaggagcctgagatctgacgacacggccgtgt
attactgtgcgagaagcgactactacggcccatacttcgactactggggccagggcaccaccctgaccgtgtccagcgcta
gcaccaagggcccatcggtcttccccctggcaccctcctccaagagcacctctgggggcacagcggccctgggctgcctgg
tcaaggactacttccccgaaccggtgacggtgtcgtggaactcaggcgccctgaccagc
Mouse C3 Light Chain variable region sequence:
(DNA)
(SEQ ID NO: 458)
gatgttttgatgacccaaactccactctccctgcctgtcagtcttggagatcaagcctccatctcttgcagatctagtcag
accattgtacatagtaatggaaacacctatttagaatggtacctgcagaaaccaggccagtctccaaagctcctgatctac
aaagtttccaaccgattttctggggtcccagacaggttcagtggcagtggatcagggacagatttcacactcaagatcaac
agagtggaggctgaggatctgggagtttattactgctttcaaggttcacatgttccattcacgttcggctcggggacaaag
ttggaaataaaa
(amino acids)
(SEQ ID NO: 459)
DVLMTQTPLSLPVSLGDQASISCRSSQTIVHSNGNTYLEWYLQKPGQSPKLLIYKVSNRFSGVPDRFSGSGSGTDFTLKIN
RVEAEDLGVYYCFQGSHVPFTFGSGTKLEIK
Mouse C3 light chain variable framework region 1 (FWR1) sequence:
(DNA)
(SEQ ID NO: 460)
gatgttttgatgacccaaactccactctccctgcctgtcagtcttggagatcaagcctccatctcttgc
(amino acids)
(SEQ ID NO: 461)
DVLMTQTPLSLPVSLGDQASISC
Mouse C3 light chain variable complementarity determining regions 1 (CDR1)
sequence:
(DNA)
(SEQ ID NO: 462)
agatctagtcagaccattgtacatagtaatggaaacacctatttagaa
(amino acids)
(SEQ ID NO: 463)
RSSQTIVHSNGNTYLE
Mouse C3 light chain variable framework region 2 (FWR2) sequence:
(DNA)
(SEQ ID NO: 464)
tggtacctgcagaaaccaggccagtctccaaagctcctgatctac
(amino acids)
(SEQ ID NO: 465)
WYLQKPGQSPKLLIY
Mouse C3
light chain
variable complementarity determining regions 2 (CDR2)
sequence:
(DNA)
(SEQ ID NO: 466)
aaagtttccaaccgattttct
(amino acids)
(SEQ ID NO: 467)
KVSNRFS
Mouse C3 light chain variable framework region 3 (FWR3) sequence:
(DNA)
(SEQ ID NO: 468)
ggggtcccagacaggttcagtggcagtggatcagggacagatttcacactcaagatcaacagagtggaggctgaggatct
gggagtttattactgc
(amino acids)
(SEQ ID NO: 469)
GVPDRFSGSGSGTDFTLKINRVEAEDLGVYYC
Mouse C3 light chain variable complementarity determining regions 3 (CDR3)
sequence:
(DNA)
(SEQ ID NO: 470)
tttcaaggttcacatgttccattcacg
(amino acids)
(SEQ ID NO: 471)
FQGSHVPFT
IGKV2-29*03 light chain variable region sequence:
(DNA)
(SEQ ID NO: 472)
gatattgtgatgacccagactccactctctctgtccgtcacccctggacagccggcctccatctcctgcaagtctagtca
gagcctcctgcatagtgatggaaagacctatttgtattggtacctgcagaagccaggccagtctccacagctcctgatct
atgaagtttccagccggttctctggagtgccagataggttcagtggcagcgggtcagggacagatttcacactgaaaatc
agccgggggaggctgaggatgttggggtttattactgcatgcaaggtatacaccttcct
(amino acids)
(SEQ ID NO: 473)
DIVMTQTPLSLSVTPGQPASISCKSSQSLLHSDGKTYLYWYLQKPGQSPQLLIYEVSSRFSGVPDRESGSGSGTDFTLKI
SRVEAEDVGVYYCMQGIHLP
IGKV2-29*03 light chain variable framework region 1 (FWR1) acid sequence:
(DNA)
(SEQ ID NO: 474)
gatattgtgatgacccagactccactctctctgtccgtcacccctggacagccggcctccatctcctgc
(amino acids)
(SEQ ID NO: 475)
DIVMTQTPLSLSVTPGQPASISC
IGKV2-29*03 light chain variable complementarity determining regions 1 (CDR1)
sequence:
(DNA)
(SEQ ID NO: 476)
aagtctagtcagagcctcctgcatagtgatggaaagacctatttgtat
(amino acids)
(SEQ ID NO: 477)
KSSQSLLHSDGKTYLY
IGKV2-29*03 light chain variable framework region 2 (FWR2) sequence:
(DNA)
(SEQ ID NO: 478)
tggtacctgcagaagccaggccagtctccacagctcctgatctat
(amino acids)
(SEQ ID NO: 479)
WYLQKPGQSPQLLIY
IGKV2-29*03 light chain variable complementarity determining regions 2 (CDR2)
sequence:
(DNA)
(SEQ ID NO: 480)
gaagtttccagccggttc
(amino acids)
(SEQ ID NO: 481)
EVSSRES
IGKV2-29*03 light chain variable framework region 3 (FWR3) sequence:
(DNA)
(SEQ ID NO: 482)
ggagtgccagataggttcagtggcagcgggtcagggacagatttcacactgaaaatcagccgggtggaggctgaggatgt
tggggtttattactgc
(amino acids)
(SEQ ID NO: 483)
GVPDRFSGSGSGTDFTLKISRVEAEDVGVYYC
IGKV2-29*03
light chain variable complementarity determining regions3 (CDR3)
sequence:
(DNA)
(SEQ ID NO: 484)
atgcaaggtatacaccttcct
(amino acids)
(SEQ ID NO: 485)
MQGIHLP
Humanized C3 light chain variable region sequence:
(DNA)
(SEQ ID NO: 486)
gatattgtgatgacccagactccactctctctgtccgtcacccctggacagccggcctccatctcctgcaggtctagtcag
accattgtccatagtaatggaaacacctatttggagtggtacctgcagaagccaggccagtctccacagctcctgatctat
aaggtttccaaccggttctctggagtgccagataggttcagtggcagcgggtcagggacagatttcacactgaaaatcagc
cgggtggaggctgaggatgttggggtttattactgcttccaaggtagccacgtgcctttcaccttcggcggagggaccaag
gtggagatcaaacgaact
(amino acids)
(SEQ ID NO: 487)
DIVMTQTPLSLSVTPGQPASISCRSSQTIVHSNGNTYLEWYLQKPGQSPQLLIYKVSNRFSGVPDRFSGSGSGTDFTLKI
SRVEAEDVGVYYCFQGSHVPFTFGGGTKVEIKRT
Humanized C3 light chain variable framework region 1 (FWR1) acid sequence:
(DNA)
(SEQ ID NO: 488)
gatattgtgatgacccagactccactctctctgtccgtcacccctggacagccggcctccatctcctgc
(amino acids)
(SEQ ID NO: 489)
DIVMTQTPLSLSVTPGQPASISC
Humanized C3 light chain variable complementarity determining regions 1 (CDR1)
sequence:
(DNA)
(SEQ ID NO: 490)
ggtctagtcagaccattgtccatagtaatggaaacacctatttggag
(amino acids)
(SEQ ID NO: 491)
RSSQTIVHSNGNTYLE
Humanized C3 light chain variable framework region 2 (FWR2) acid sequence:
(DNA)
(SEQ ID NO: 492)
tggtacctgcagaagccaggccagtctccacagctcctgatctat
(amino acids)
(SEQ ID NO: 493)
WYLQKPGQSPQLLIY
Humanized C3 light chain variable complementarity determining regions 2 (CDR2)
sequence:
(DNA)
(SEQ ID NO: 494)
aaggtttccaaccggttctct
(amino acids)
(SEQ ID NO: 495)
KVSNRFS
Humanized C3 light chain variable framework region 3 (FWR3) acid sequence:
(DNA)
(SEQ ID NO: 496)
ggagtgccagataggttcagtggcagcgggtcagggacagatttcacactgaaaatcagccgggtggaggctgaggatgtt
ggggtttattactgc
(amino acids)
(SEQ ID NO: 497)
GVPDRFSGSGSGTDFTLKISRVEAEDVGVYYC
Humanized C3 light chain variable complementarity determining regions 3 (CDR3)
sequence:
(DNA)
(SEQ ID NO: 498)
ttccaaggtagccacgtgcctttcacc
(amino acids)
(SEQ ID NO: 499)
FQGSHVPFT
Humanized C3 lambda light chain sequence
(DNA)
(SEQ ID NO: 500)
gatattgtgatgacccagactccactctctctgtccgtcacccctggacagccggcctccatctcctgcaggtctagtcag
accattgtccatagtaatggaaacacctatttggagtggtacctgcagaagccaggccagtctccacagctcctgatctat
aaggtttccaaccggttctctggagtgccagataggttcagtggcagcgggtcagggacagatttcacactgaaaatcagc
cgggtggaggctgaggatgttggggtttattactgcttccaaggtagccacgtgcctttcaccttcggcggagggaccaag
gtggagatcaaacgaactggtcagcccaaggctgccccctcggtcactctgttcccgccctcctctgaggagcttcaagcc
aacaaggccacactggtgtgtctcataagtgacttctacccgggagccgtgacagtggcctggaaggcagatagcagcccc
gtcaaggcgggagtggagaccaccacaccctccaaacaaagcaacaacaagtacgcggccagcagctatctgagcctgacg
cctgagcagtggaagtcccacagaagctacagctgccaggtcacgcatgaagggagcaccgtggagaagacagtggcccct
acagaatgttcatagtaa
(amino acids)
(SEQ ID NO: 501)
DIVMTQTPLSLSVTPGQPASISCRSSQTIVHSNGNTYLEWYLQKPGQSPQLLIYKVSNRFSGVPDRESGSGSGTDFTLKI
SRVEAEDVGVYYCFQGSHVPFTFGGGTKVEIKRTGQPKAAPSVTLFPPSSEELQANKATLVCLISDFYPGAVTVAWKADS
SPVKAGVETTTPSKQSNNKYAASSYLSLTPEQWKSHRSYSCQVTHEGSTVEKTVAPTECS**
Humanized C3 Kappa light chain
(DNA)
(SEQ ID NO: 502)
gatattgtgatgacccagactccactctctctgtccgtcacccctggacagccggcctccatctcctgcaggtctagtcag
accattgtccatagtaatggaaacacctatttggagtggtacctgcagaagccaggccagtctccacagctcctgatctat
aaggtttccaaccggttctctggagtgccagataggttcagtggcagcgggtcagggacagatttcacactgaaaatcagc
cgggtggaggctgaggatgttggggtttattactgcttccaaggtagccacgtgcctttcaccttcggcggagggaccaag
gtggagatcaaacgaactacggtggctgcaccatctgtcttcatcttcccgccatctgatgagcagttgaaatctggaact
gcctctgttgtgtgcctgctgaataacttctatcccagagaggccaaagtacagtggaaggtggataacgccctccaatcg
ggtaactcccaggagagtgtcacagagcaggacagcaaggacagcacctacagcctcagcagcaccctgacgctgagcaaa
gcagactacgagaaacacaaagtctacgcctgcgaagtcacccatcagggcctgagctcgcccgtcacaaagagcttcaac
aggggagagtgttagtaa
(amino acids)
(SEQ ID NO: 503)
DIVMTQTPLSLSVTPGQPASISCRSSQTIVHSNGNTYLEWYLQKPGQSPQLLIYKVSNRFSGVPDRFSGSGSGTDFTLKI
SRVEAEDVGVYYCFQGSHVPFTFGGGTKVEIKRTTVAAPSVFIFPPSDEQLKSGTASVVCLLNNFYPREAKVQWKVDNAL
QSGNSQESVTEQDSKDSTYSLSSTLTLSKADYEKHKVYACEVTHQGLSSPVTKSENRGEC**
Humanized C3 Kappa light gBLOCK sequence:
(DNA)
(SEQ ID NO: 504)
agctggctaggtaagcttggtaccgagctcggatccacgccaccatggagacagacacactcctgctatgggtactgctgc
tctgggttccaggttccactggtgacgatattgtgatgacccagactccactctctctgtccgtcacccctggacagccgg
cctccatctcctgcaggtctagtcagaccattgtccatagtaatggaaacacctatttggagtggtacctgcagaagccag
gccagtctccacagctcctgatctataaggtttccaaccggttctctggagtgccagataggttcagtggcagcgggtcag
ggacagatttcacactgaaaatcagccgggtggaggctgaggatgttggggtttattactgcttccaaggtagccacgtgc
ctttcaccttcggcggagggaccaaggtggagatcaaacgaactacggtggctgcaccatctgtcttcatcttcccgccat
ctgatgagcagttgaaatctggaactgcctctgttgtgtgcctgctgaataacttctatcccagagaggccaaagtacagt
ggaaggtggataacgccctccaatcgggtaactcccaggagagtgtcacagagcaggacagcaaggacagcacctacagcc
tcagcagcaccctgacgctgagcaaagcagactacgagaaacacaaagtctacgcctgcgaagtcacccatcagggcctga
gctcgcccgtcacaaagagcttcaacaggggagagtgttagtaagtttaaacccgctgatcagcctcgactgtgccttcta
gttgc
Mouse C8 heavy chain variable region sequence
(DNA)
(SEQ ID NO: 505)
gaagtgatggtcgtggaaagcggcggtggtctggtaaagccggggggatcccttaagctttcttgcgccgcatccgggttc
acgttctccggctatgccatgtcctgggtccgacagactcccgaaaagcgcttggaatgggtggccactatctcctccggg
gggacgtacatctactaccccgacagtgtgaaaggaagatttacaatatctcgcgacaacgcaaaaaataccttgtatctt
caaatgagctccctgcggtcagaggacactgccatgtactattgcgcccgcctgggcggcgacaattactatgagtat
(amino acids)
(SEQ ID NO: 506)
EVMVVESGGGLVKPGGSLKLSCAASGFTFSGYAMSWVRQTPEKRLEWVATISSGGTYIYYPDSVKGRFTISRDNAKNTLYL
QMSSLRSEDTAMYYCARLGGDNYYEY
Mouse C8 heavy chain variable complementarity determining region 1 (CDR1)
sequence:
(DNA)
(SEQ ID NO: 507)
ggctatgccatgtcc
(amino acids)
(SEQ ID NO: 508)
GYAMS
Mouse C8 heavy chain variable complementarity determining region 2 (CDR2)
sequence:
(DNA)
(SEQ ID NO: 509)
actatctcctccggggggacgtacatctactaccccgacagtgtgaaagga
(amino acids)
(SEQ ID NO: 510)
TISSGGTYIYYPDSVKG
Mouse C8 heavy chain variable complementarity determining region 3 (CDR3)
sequence:
(DNA)
(SEQ ID NO: 511)
ctgggcggcgacaattactatgagtat
(amino acids)
(SEQ ID NO: 512)
LGGDNYYEY
IGHV3-21*04 heavy chain variable region sequence:
(DNA)
(SEQ ID NO: 513)
gaggtgcagctggtggagtctgggggaggcctggtcaagcctggggggtccctgagactctcctgtgcagcctctggatt
caccttcagtagctatagcatgaactgggtccgccaggctccagggaaggggctggagtgggtctcatccattagtagta
gtagtagttacatatactacgcagactcagtgaagggccgattcaccatctccagagacaacgccaagaactcactgtat
ctgcaaatgaacagcctgagagccgaggacacggccgtgtattactgtgcga
(amino acids)
(SEQ ID NO: 514)
EVQLVESGGGLVKPGGSLRLSCAASGFTFSSYSMNWVRQAPGKGLEWVSSISSSSSYIYYADSVKGRFTISRDNAKNSLY
LQMNSLRAEDTAVYYCAR
IGHV3-21*04 heavy chain variable framework region 1 (FWR1) sequence:
(DNA)
(SEQ ID NO: 515)
gaggtgcagctggtggagtctgggggaggcctggtcaagcctggggggtccctgagactctcctgtgcagcctctggatt
caccttcagt
(amino acids)
(SEQ ID NO: 516)
EVQLVESGGGLVKPGGSLRLSCAASGFTFS
IGHV3-21*04 heavy chain variable complementarity determining regions 1 (CDR1)
sequence:
(DNA)
(SEQ ID NO: 517)
agctatagcatgaac
(amino acids)
(SEQ ID NO: 518)
SYSMN
IGHV3-21*04 heavy chain variable framework region 2 (FWR2) sequence:
(DNA)
(SEQ ID NO: 519)
tgggtccgccaggctccagggaaggggctggagtgggtc
(amino acids)
(SEQ ID NO: 520)
WVRQAPGKGLEWV
IGHV3-21*04 heavy chain variable complementarity determining regions 2 (CDR2)
sequence:
(DNA)
(SEQ ID NO: 521)
tcatccattagtagtagtagtagttacatatactacgcagactcagtgaagggc
(amino acids)
(SEQ ID NO: 522)
SSISSSSSYIYYADSVKG
IGHV3-21*04 heavy chain variable framework region 3 (FWR3) sequence:
(DNA)
(SEQ ID NO: 523)
cgattcaccatctccagagacaacgccaagaactcactgtatctgcaaatgaacagcctgagagccgaggacacggccgt
gtattactgtgcga
(amino acids)
(SEQ ID NO: 524)
RFTISRDNAKNSLYLQMNSLRAEDTAVYYCAR
Humanized C8 heavy chain variable region sequence:
(DNA)
(SEQ ID NO: 525)
gaggtgcagctggtggagtctgggggaggcctggtcaagcctggggggtccctgagactctcctgtgcagcctctggattc
accttcagtggctatgccatgagctgggtccgccaggctccagggaaggggctggagtgggtctcaaccattagtagtggc
ggaacctacatatactaccctgactcagtgaagggccgattcaccatctccagagacaacgccaagaactcactgtatctg
caaatgaacagcctgagagccgaggacacggccgtgtattactgtgcgagactgggcggcgataactattatgaatattgg
ggcaaagggaccacggtcaccgtctcctcc
(amino acids)
(SEQ ID NO: 526)
EVQLVESGGGLVKPGGSLRLSCAASGFTFSGYAMSWVRQAPGKGLEWVSTISSGGTYIYYPDSVKGRFTISRDNAKNSLY
LQMNSLRAEDTAVYYCARLGGDNYYEYWGKGTTVTVSS
Humanized C8 heavy chain variable framework region 1 (FWR1) sequence:
(DNA)
(SEQ ID NO: 527)
gaggtgcagctggtggagtctgggggaggcctggtcaagcctggggggtccctgagactctcctgtgcagcctctggattc
accttcagt
(amino acids)
(SEQ ID NO: 528)
EVQLVESGGGLVKPGGSLRLSCAASGFTFS
Humanized C8 heavy chain variable complementarity determining region 1 (CDR1)
sequence:
(DNA)
(SEQ ID NO: 529)
ggctatgccatgagc
(amino acids)
(SEQ ID NO: 530)
GYAMS
Humanized C8 heavy chain variable framework region 2 (FWR2) sequence:
(DNA)
(SEQ ID NO: 531)
tgggtccgccaggctccagggaaggggctggagtgggtctca
(amino acids)
(SEQ ID NO: 532)
WVRQAPGKGLEWVS
Humanized C8 heavy chain variable complementarity determining region 2 (CDR2)
sequence:
(DNA)
(SEQ ID NO: 533)
accattagtagtggcggaacctacatatactaccctgactcagtgaagggc
(amino acids)
(SEQ ID NO: 534)
TISSGGTYIYYPDSVKG
Humanized C8 heavy chain variable framework region 3 (FWR3) sequence:
(DNA)
(SEQ ID NO: 535)
cgattcaccatctccagagacaacgccaagaactcactgtatctgcaaatgaacagcctgagagccgaggacacggccgtg
tattactgtgcgaga
(amino acids)
(SEQ ID NO: 536)
RFTISRDNAKNSLYLQMNSLRAEDTAVYYCAR
Humanized C8 heavy chain variable complementarity determining region 3 (CDR3)
sequence:
(DNA)
(SEQ ID NO: 537)
ctgggcggcgataactattatgaatat
(amino acids)
(SEQ ID NO: 538)
LGGDNYYEY
Humanized C8 IgG1 heavy chain sequence
(DNA)
(SEQ ID NO: 539)
gaggtgcagctggtggagtctgggggaggcctggtcaagcctggggggtccctgagactctcctgtgcagcctctggattc
accttcagtggctatgccatgagctgggtccgccaggctccagggaaggggctggagtgggtctcaaccattagtagtggc
ggaacctacatatactaccctgactcagtgaagggccgattcaccatctccagagacaacgccaagaactcactgtatctg
caaatgaacagcctgagagccgaggacacggccgtgtattactgtgcgagactgggcggcgataactattatgaatattgg
ggcaaagggaccacggtcaccgtctcctccgctagcaccaagggcccatcggtcttccccctggcaccctcctccaagagc
acctctgggggcacagcggccctgggctgcctggtcaaggactacttccccgaaccggtgacggtgtcgtggaactcaggc
gccctgaccagcggcgtgcacaccttcccggctgtcctacagtcctcaggactctactccctcagcagcgtggtgacagtg
ccctccagcagcttgggcacccagacctacatctgcaacgtgaatcacaagcccagcaacaccaaggtggacaagaaagtt
gagcccaaatcttgtgacaaaactcacacatgcccaccgtgcccagcacctgaactcctggggggaccgtcagtcttcctc
ttccccccaaaacccaaggacaccctcatgatctcccggacccctgaggtcacatgcgtggtggtggacgtgagccacgaa
gaccctgaggtcaagttcaactggtacgtggacggcgtggaggtgcataatgccaagacaaagccgcgggaggagcagtac
aacagcacgtaccgtgtggtcagcgtcctcaccgtcctgcaccaggactggctgaatggcaaggagtacaagtgcaaggtc
tccaacaaagccctcccagcccccatcgagaaaaccatctccaaagccaaagggcagccccgagaaccacaggtgtacacc
ctgcccccatcccgggaggagatgaccaagaaccaggtcagcctgacctgcctggtcaaaggcttctatcccagcgacatc
gccgtggagtgggagagcaatgggcagccggagaacaactacaagaccacgcctcccgtgctggactccgacggctccttc
ttcctctacagcaagctcaccgtggacaagagcaggtggcagcaggggaacgtcttctcatgctccgtgatgcatgaggct
ctgcacaaccactacacgcagaagagcctctccctgtctccgggtaaatgataa
(amino acids)
(SEQ ID NO: 540)
EVQLVESGGGLVKPGGSLRLSCAASGFTFSGYAMSWVRQAPGKGLEWVSTISSGGTYIYYPDSVKGRFTISRDNAKNSLYL
QMNSLRAEDTAVYYCARLGGDNYYEYWGKGTTVTVSSASTKGPSVFPLAPSSKSTSGGTAALGCLVKDYFPEPVTVSWNSG
ALTSGVHTFPAVLQSSGLYSLSSVVTVPSSSLGTQTYICNVNHKPSNTKVDKKVEPKSCDKTHTCPPCPAPELLGGPSVFL
FPPKPKDTLMISRTPEVTCVVVDVSHEDPEVKFNWYVDGVEVHNAKTKPREEQYNSTYRVVSVLTVLHQDWLNGKEYKCKV
SNKALPAPIEKTISKAKGQPREPQVYTLPPSREEMTKNQVSLTCLVKGFYPSDIAVEWESNGQPENNYKTTPPVLDSDGSF
FLYSKLTVDKSRWQQGNVFSCSVMHEALHNHYTQKSLSLSPGK**
Humanized C8 IgG2 heavy chain sequence
(DNA)
(SEQ ID NO: 541)
gaggtgcagctggtggagtctgggggaggcctggtcaagcctggggggtccctgagactctcctgtgcagcctctggattc
accttcagtggctatgccatgagctgggtccgccaggctccagggaaggggctggagtgggtctcaaccattagtagtggc
ggaacctacatatactaccctgactcagtgaagggccgattcaccatctccagagacaacgccaagaactcactgtatctg
caaatgaacagcctgagagccgaggacacggccgtgtattactgtgcgagactgggcggcgataactattatgaatattgg
ggcaaagggaccacggtcaccgtctcctccgcctccaccaagggcccatcggtcttccccctggcgccctgctccaggagc
acctccgagagcacagccgccctgggctgcctggtcaaggactacttccccgaaccggtgacggtgtcgtggaactcaggc
gctctgaccagcggcgtgcacaccttcccagctgtcctacagtcctcaggactctactccctcagcagcgtggtgaccgtg
ccctccagcaacttcggcacccagacctacacctgcaacgtagatcacaagcccagcaacaccaaggtggacaagacagtt
gagcgcaaatgttgtgtcgagtgcccaccgtgcccagcaccacctgtggcaggaccgtcagtcttcctcttccccccaaaa
cccaaggacaccctcatgatctcccggacccctgaggtcacgtgcgtggtggtggacgtgagccacgaagaccccgaggtc
cagttcaactggtacgtggacggcgtggaggtgcataatgccaagacaaagccacgggaggagcagttcaacagcacgttc
cgtgtggtcagcgtcctcaccgttgtgcaccaggactggctgaacggcaaggagtacaagtgcaaggtctccaacaaaggc
ctcccagcccccatcgagaaaaccatctccaaaaccaaagggcagccccgagaaccacaggtgtacaccctgcccccatcc
cgggaggagatgaccaagaaccaggtcagcctgacctgcctggtcaaaggcttctaccccagcgacatcgccgtggagtgg
gagagcaatgggcagccggagaacaactacaagaccacacctcccatgctggactccgacggctccttcttcctctacagc
aagctcaccgtggacaagagcaggtggcagcaggggaacgtcttctcatgctccgtgatgcatgaggctctgcacaaccac
tacacgcagaagagcctctccctgtctccgggtaaatagtaa
(amino acids)
(SEQ ID NO: 542)
EVQLVESGGGLVKPGGSLRLSCAASGFTFSGYAMSWVRQAPGKGLEWVSTISSGGTYIYYPDSVKGRFTISRDNAKNSLYL
QMNSLRAEDTAVYYCARLGGDNYYEYWGKGTTVTVSSASTKGPSVFPLAPCSRSTSESTAALGCLVKDYFPEPVTVSWNSG
ALTSGVHTFPAVLQSSGLYSLSSVVTVPSSNFGTQTYTCNVDHKPSNTKVDKTVERKCCVECPPCPAPPVAGPSVFLFPPK
PKDTLMISRTPEVTCVVVDVSHEDPEVQFNWYVDGVEVHNAKTKPREEQFNSTFRVVSVLTVVHQDWLNGKEYKCKVSNKG
LPAPIEKTISKTKGQPREPQVYTLPPSREEMTKNQVSLTCLVKGFYPSDIAVEWESNGQPENNYKTTPPMLDSDGSFFLYS
KLTVDKSRWQQGNVFSCSVMHEALHNHYTQKSLSLSPGK**
Mouse C8 light chain variable region sequence
(DNA)
(SEQ ID NO: 543)
gacatcgtcattacgcagacccctgccagtcttgccgtttctctgggccagagggccactatcagttacagggcgagtaag
tctgtgagtaccagcggctatagttacatgcattggaaccagcagaaaccgggacagccaccacgcctgcttatttatctg
gtgtctaatcttgagtccggggtgcccgccaggttcagcggcagcggctctgggaccgacttcacactcaacattcatcca
gtggaagaagaggacgctgctacatactactgtcaacacattcgggaactgaccaggagtgaa
(amino acids)
(SEQ ID NO: 544)
DIVITQTPASLAVSLGQRATISYRASKSVSTSGYSYMHWNQQKPGQPPRLLIYLVSNLESGVPARFSGSGSGTDFTLNIHP
VEEEDAATYYCQHIRELTRSE
Mouse C8 light chain variable complementarity determining region 1 (CDR1)
sequence:
(DNA)
(SEQ ID NO: 545)
agggcgagtaagtctgtgagtaccagcggctatagttacatgcat
(amino acids)
(SEQ ID NO: 546)
RASKSVSTSGYSYMH
Mouse C8 light chain variable complementarity determining region 2 (CDR2)
sequence:
(DNA)
(SEQ ID NO: 547)
ctggtgtctaatcttgagtcc
(amino acids)
(SEQ ID NO: 548)
LVSNLES
Mouse C8 light chain variable complementarity determining region 3 (CDR3)
sequence:
(DNA)
(SEQ ID NO: 549)
caacacattcgggaactgaccaggagtgaa
(amino acids)
(SEQ ID NO: 550)
QHIRELTRSE
NCBI germline z00023 light chain variable region sequence:
(DNA)
(SEQ ID NO: 551)
gacatcgtgatgacccagtctccagactccctggctgtgtctctgggcgagagggccaccatcaactgcaagtccagccag
agtgttttatacagctccaacaataagaactacttagcttggtaccagcagaaaccaggacagcctcctaagctgctcatt
tactgggcatctacccgggaatccggggtccctgaccgattcagtggcagcgggtctgggacagatttcactctcaccatc
agcagcctgcaggctgaagatgtggcagtttattactgtcagcaatattatagtactcct
(amino acids)
(SEQ ID NO: 552)
DIVMTQSPDSLAVSLGERATINCKSSQSVLYSSNNKNYLAWYQQKPGQPPKLLIYWASTRESGVPDRFSGSGSGTDFTLT
ISSLQAEDVAVYYCQQYYSTP
NCBI germline z00023 light chain variable framework region 1 (FWR1) acid sequence:
(DNA)
(SEQ ID NO: 553)
gacatcgtgatgacccagtctccagactccctggctgtgtctctgggcgagagggccaccatcaactgc
(amino acids)
(SEQ ID NO: 554)
DIVMTQSPDSLAVSLGERATINC
NCBI germline z00023 light chain variable complementarity determining regions 1
(CDR1) sequence:
(DNA)
(SEQ ID NO: 555)
aagtccagccagagtgttttatacagctccaacaataagaactacttagct
(amino acids)
(SEQ ID NO: 556)
KSSQSVLYSSNNKNYLA
NCBI germline z00023 light chain variable framework region 2 (FWR2) sequence:
(DNA)
(SEQ ID NO: 557)
tggtaccagcagaaaccaggacagcctcctaagctgctcatttac
(amino acids)
(SEQ ID NO: 558)
WYQQKPGQPPKLLIY
NCBI germline z00023 light chain variable complementarity determining regions 2
(CDR2) sequence:
(DNA)
(SEQ ID NO: 559)
tgggcatctacccgggaatcc
(amino acids)
(SEQ ID NO: 560)
WASTRES
NCBI germline z00023 light chain variable framework region 3 (FWR3) sequence:
(DNA)
(SEQ ID NO: 561)
ggggtccctgaccgattcagtggcagcgggtctgggacagatttcactctcaccatcagcagcctgcaggctgaagatgt
ggcagtttattactgt
(amino acids)
(SEQ ID NO: 562)
GVPDRFSGSGSGTDFTLTISSLQAEDVAVYYC
NCBI germline z00023 light chain variable complementarity determining regions3
(CDR3) sequence:
(DNA)
(SEQ ID NO: 563)
cagcaatattatagtactcct
(amino acids)
(SEQ ID NO: 564)
QQYYSTP
Humanized C8 light chain variable region sequence
(DNA)
(SEQ ID NO: 565)
gacatcgtgatgacccagtctccagactccctggctgtgtctctgggcgagagggccaccatcaactgcagggccagcaag
agtgttagcaccagcggctacagctacatgcactggtaccagcagaaaccaggacagcctcctaagctgctcatttacctg
gtgtctaacctggaatccggggtccctgaccgattcagtggcagcgggtctgggacagatttcactctcaccatcagcagc
ctgcaggctgaagatgtggcagtttattactgtcaacacattcgggaactgaccaggagtgaattcggcggagggaccaag
gtggagatcaaacgaact
(amino acids)
(SEQ ID NO: 566)
DIVMTQSPDSLAVSLGERATINCRASKSVSTSGYSYMHWYQQKPGQPPKLLIYLVSNLESGVPDRFSGSGSGTDFTLTIS
SLQAEDVAVYYCQHIRELTRSEFGGGTKVEIKRT
Humanized C8 light chain variable framework region 1 (FWR1) sequence:
(DNA)
(SEQ ID NO: 567)
gacatcgtgatgacccagtctccagactccctggctgtgtctctgggcgagagggccaccatcaactgc
(amino acids)
(SEQ ID NO: 568)
DIVMTQSPDSLAVSLGERATINC
Humanized C8 light chain variable complementarity determining region 1 (CDR1)
sequence:
(DNA)
(SEQ ID NO: 569)
agggccagcaagagtgttagcaccagcggctacagctacatg
(amino acids)
(SEQ ID NO: 570)
RASKSVSTSGYSYM
Humanized C8 light chain variable framework region 2 (FWR2) sequence:
(DNA)
(SEQ ID NO: 571)
cactggtaccagcagaaaccaggacagcctcctaagctgctcatttac
(amino acids)
(SEQ ID NO: 572)
HWYQQKPGQPPKLLIY
Humanized C8 light chain variable complementarity determining region 2 (CDR2)
sequence:
(DNA)
(SEQ ID NO: 573)
ctggtgtctaacctggaatcc
(amino acids)
(SEQ ID NO: 574)
LVSNLES
Humanized C8 light chain variable framework region 3 (FWR3) sequence:
(DNA)
(SEQ ID NO: 575)
ggggtccctgaccgattcagtggcagcgggtctgggacagatttcactctcaccatcagcagcctgcaggctgaagatgtg
gcagtttattactgt
(amino acids)
(SEQ ID NO: 576)
GVPDRFSGSGSGTDFTLTISSLQAEDVAVYYC
Humanized C8 light chain variable complementarity determining region 3 (CDR3)
sequence:
(DNA)
(SEQ ID NO: 577)
caacacattcgggaactgaccaggagtgaa
(amino acids)
(SEQ ID NO: 578)
QHIRELTRSE
Humanized C8 Lambda light chain sequence
(DNA)
(SEQ ID NO: 579)
gacatcgtgatgacccagtctccagactccctggctgtgtctctgggcgagagggccaccatcaactgcagggccagcaag
agtgttagcaccagcggctacagctacatgcactggtaccagcagaaaccaggacagcctcctaagctgctcatttacctg
gtgtctaacctggaatccggggtccctgaccgattcagtggcagcgggtctgggacagatttcactctcaccatcagcagc
ctgcaggctgaagatgtggcagtttattactgtcaacacattcgggaactgaccaggagtgaattcggcggagggaccaag
gtggagatcaaacgaactggtcagcccaaggctgccccctcggtcactctgttcccgccctcctctgaggagcttcaagcc
aacaaggccacactggtgtgtctcataagtgacttctacccgggagccgtgacagtggcctggaaggcagatagcagcccc
gtcaaggcgggagtggagaccaccacaccctccaaacaaagcaacaacaagtacgcggccagcagctatctgagcctgacg
cctgagcagtggaagtcccacagaagctacagctgccaggtcacgcatgaagggagcaccgtggagaagacagtggcccct
acagaatgttcatagtaa
(amino acids)
(SEQ ID NO: 580)
DIVMTQSPDSLAVSLGERATINCRASKSVSTSGYSYMHWYQQKPGQPPKLLIYLVSNLESGVPDRFSGSGSGTDFTLTISS
LQAEDVAVYYCQHIRELTRSEFGGGTKVEIKRTGQPKAAPSVTLFPPSSEELQANKATLVCLISDFYPGAVTVAWKADSSP
VKAGVETTTPSKQSNNKYAASSYLSLTPEQWKSHRSYSCQVTHEGSTVEKTVAPTECS**
Humanized C8 Kappa light chain sequence
(DNA)
(SEQ ID NO: 581)
gacatcgtgatgacccagtctccagactccctggctgtgtctctgggcgagagggccaccatcaactgcagggccagcaag
agtgttagcaccagcggctacagctacatgcactggtaccagcagaaaccaggacagcctcctaagctgctcatttacctg
gtgtctaacctggaatccggggtccctgaccgattcagtggcagcgggtctgggacagatttcactctcaccatcagcagc
ctgcaggctgaagatgtggcagtttattactgtcaacacattcgggaactgaccaggagtgaattcggcggagggaccaag
gtggagatcaaacgaactacggtggctgcaccatctgtcttcatcttcccgccatctgatgagcagttgaaatctggaact
gcctctgttgtgtgcctgctgaataacttctatcccagagaggccaaagtacagtggaaggtggataacgccctccaatcg
ggtaactcccaggagagtgtcacagagcaggacagcaaggacagcacctacagcctcagcagcaccctgacgctgagcaaa
gcagactacgagaaacacaaagtctacgcctgcgaagtcacccatcagggcctgagctcgcccgtcacaaagagcttcaac
aggggagagtgttagtaa
(amino acids)
(SEQ ID NO: 582)
DIVMTQSPDSLAVSLGERATINCRASKSVSTSGYSYMHWYQQKPGQPPKLLIYLVSNLESGVPDRFSGSGSGTDFTLTISS
LQAEDVAVYYCQHIRELTRSEFGGGTKVEIKRTTVAAPSVFIFPPSDEQLKSGTASVVCLLNNFYPREAKVQWKVDNALQS
GNSQESVTEQDSKDSTYSLSSTLTLSKADYEKHKVYACEVTHQGLSSPVTKSFNRGEC**
Humanized C8 Kappa light chain gBLOCK sequence:
(DNA)
(SEQ ID NO: 583)
agctggctaggtaagcttggtaccgagctcggatccacgccaccatggagacagacacactcctgctatgggtactgctgc
tctgggttccaggttccactggtgacgacatcgtgatgacccagtctccagactccctggctgtgtctctgggcgagaggg
ccaccatcaactgcagggccagcaagagtgttagcaccagcggctacagctacatgcactggtaccagcagaaaccaggac
agcctcctaagctgctcatttacctggtgtctaacctggaatccggggtccctgaccgattcagtggcagcgggtctggga
cagatttcactctcaccatcagcagcctgcaggctgaagatgtggcagtttattactgtcaacacattcgggaactgacca
ggagtgaattcggcggagggaccaaggtggagatcaaacgaactacggtggctgcaccatctgtcttcatcttcccgccat
ctgatgagcagttgaaatctggaactgcctctgttgtgtgcctgctgaataacttctatcccagagaggccaaagtacagt
ggaaggtggataacgccctccaatcgggtaactcccaggagagtgtcacagagcaggacagcaaggacagcacctacagcc
tcagcagcaccctgacgctgagcaaagcagactacgagaaacacaaagtctacgcctgcgaagtcacccatcagggcctga
gctcgcccgtcacaaagagcttcaacaggggagagtgttagtaagtttaaacccgctgatcagcctcgactgtgccttcta
gttgc
CAR-T E6 CD8 sequence:
(DNA)
(SEQ ID NO: 584)
gaggtccagctggttgagagtggcggtgggctggttaagcctggcggctccctgcggctgagctgcgccgcgagtggattt
actttcagccgatatgggatgagttgggtgcggcaagctcccgggaagaggctggaatgggtctcaacaatctccgggggg
ggcacttacatctattaccccgactcagtcaaggggagatttaccatttcacgagacaacgctaagaataccctgtatttg
cagatgaattctctgagagcagaggacacagctgtttactattgtacccgcgacaactatggcaggaactacgactacggt
atggactattggggacaagggacattggttacagtgagcagtggcggcgggggcagcggaggaggaggcagcggtgggggg
ggcagcgagatagtgctcacgcagtcacccgcgactctcagtctctcacctggggaacgagctaccctgacgtgctctgct
acctcctcagtgtcatatattcactggtatcagcaacggcccgggcagtcccctagattgctcatttatagtacctctaat
ctggcctcaggtatccctgcacgattttctggatctggttcaggttctgattacaccctcactatctctagcctggagcct
gaagactttgccgtttattactgccagcagaggtctagctccccattcacctttgggagtgggaccaaggttgaaattaaa
acgacaaccccggcccccagaccaccaacgccagcccccaccatcgccagccaacccctgtctctgagaccagaagcctgt
aggcctgccgccggtggagctgtgcacacaagaggactggatttcgcctgtgatatctacatttgggccccgctcgcaggc
acatgtggagtgctcctcctctccctggtgattaccctgtactgctgataa
(amino acids)
(SEQ ID NO: 585)
EVQLVESGGGLVKPGGSLRLSCAASGFTFSRYGMSWVRQAPGKRLEWVSTISGGGTYIYYPDSVKGRFTISRDNAKNTLY
LQMNSLRAEDTAVYYCTRDNYGRNYDYGMDYWGQGTLVTVSSGGGGSGGGGSGGGGSEIVLTQSPATLSLSPGERATLTC
SATSSVSYIHWYQQRPGQSPRLLIYSTSNLASGIPARFSGSGSGSDYTLTISSLEPEDFAVYYCQQRSSSPFTFGSGTKV
EIKTTTPAPRPPTPAPTIASQPLSLRPEACRPAAGGAVHTRGLDFACDIYIWAPLAGTCGVLLLSLVITLYC**
CAR-T C2 CD8 CD8 sequence:
N-CD81s-huMNC2scFv-CD8ecd fragment-CD8 transmembrane-C
(DNA)
(SEQ ID NO: 586)
gaagtgcagctcgtagagagtggcgggggactggtgaagcccggtggaagcctcagactcagttgcgccgcctcaggtttc
actttttcaggttacgccatgtcctgggtaagacaggcaccggggaaaggactcgagtgggtgtctactatcagctcagga
ggcacttatatatattatcctgactctgtaaaaggccgatttacgatttctcgcgacaatgcaaagaactccctctacctc
caaatgaacagtcttagggcagaagacactgctgtatactattgtgcacgcctcggcggcgacaactactacgagtacttt
gacgtgtgggggaaagggactaccgtgacagtttcaagcggaggaggtggctcaggtggaggcgggtcaggggggggagga
agtgatattgtgctcacacaatccccagcctccctggctgtgtctcccggccaacgcgctacaattacatgtcgggcctcc
aaaagcgtgagcaccagcggctacagctacatgcactggtatcaacagaaaccaggacaaccccccaaactgttgatttat
ctcgcttcaaacttggagtccggcgtgcctgcgcgcttttcagggagtgggagcggcacagattttacgctgactatcaac
cccgtagaagcaaacgatacagcgaattattattgtcaacattcccgggaactcccctttacgttcggcgggggcacaaag
gtcgaaattaagagaaccacgacaaccccggcccccagaccaccaacgccagcccccaccatcgccagccaacccctgtct
ctgagaccagaagcctgtaggcctgccgccggtggagctgtgcacacaagaggactggatttcgcctgtgatatctacatt
tgggccccgctcgcaggcacatgtggagtgctcctcctctccctggtgattaccctgtactgctgataa
(amino acids)
(SEQ ID NO: 587)
EVQLVESGGGLVKPGGSLRLSCAASGFTFSGYAMSWVRQAPGKGLEWVSTISSGGTYIYYPDSVKGRFTISRDNAKNSLY
LQMNSLRAEDTAVYYCARLGGDNYYEYFDVWGKGTTVTVSSGGGGSGGGGSGGGGSDIVLTQSPASLAVSPGQRATITCR
ASKSVSTSGYSYMHWYQQKPGQPPKLLIYLASNLESGVPARFSGSGSGTDFTLTINPVEANDTANYYCQHSRELPFTFGG
GTKVEIKRTTTTPAPRPPTPAPTIASQPLSLRPEACRPAAGGAVHTRGLDFACDIYIWAPLAGTCGVLLLSLVITLYC**
CD8/4-1BB sequence
N-CD8 transmembrane-4-1BB-C
(DNA)
(SEQ ID NO: 588)
acgacaaccccggcccccagaccaccaacgccagcccccaccatcgccagccaacccctgtctctgagaccagaagcctgt
aggcctgccgccggtggagctgtgcacacaagaggactggatttcgcctgtgatatctacatttgggccccgctcgcaggc
acatgtggagtgctcctcctctccctggtgattaccctgtactgcaaaaggggccgcaaaaaactcctttacatttttaag
cagccttttatgaggccagtacagacgactcaagaggaagacgggtgctcatgccgctttcctgaggaggaggaaggaggg
tgcgaactgtgataa
(amino acids)
(SEQ ID NO: 589)
TTTPAPRPPTPAPTIASQPLSLRPEACRPAAGGAVHTRGLDFACDIYIWAPLAGTCGVLLLSLVITLYCKRGRKKLLYIF
KQPFMRPVQTTQEEDGCSCRFPEEEEGGCEL**
CD8/CD28 sequence
N-CD8 transmembrane-CD28-C
(DNA)
(SEQ ID NO: 590)
acgacaaccccggcccccagaccaccaacgccagcccccaccatcgccagccaacccctgtctctgagaccagaagcctgt
aggcctgccgccggtggagctgtgcacacaagaggactggatttcgcctgtgatatctacatttgggccccgctcgcaggc
acatgtggagtgctcctcctctccctggtgattaccctgtactgcagaagcaagcggtctcggctcctgcattctgattac
atgaacatgaccccaagaagaccaggccccaccaggaaacattaccagccctacgctccgccacgcgacttcgctgcctac
cggtcctgataa
(amino acids)
(SEQ ID NO: 591)
TTTPAPRPPTPAPTIASQPLSLRPEACRPAAGGAVHTRGLDFACDIYIWAPLAGTCGVLLLSLVITLYCRSKRSRLLHSD
YMNMTPRRPGPTRKHYQPYAPPRDFAAYRS**
CD8/CD3z sequence:
N-CD8 transmembrane-CD3zeta-C
(DNA)
(SEQ ID NO: 592)
acgacaaccccggcccccagaccaccaacgccagcccccaccatcgccagccaacccctgtctctgagaccagaagcctgt
aggcctgccgccggtggagctgtgcacacaagaggactggatttcgcctgtgatatctacatttgggccccgctcgcaggc
acatgtggagtgctcctcctctccctggtgattaccctgtactgccgcgttaagttctcccgatcagccgacgcgcctgct
tacaagcagggccagaaccaactgtacaacgagctgaatctcggtagacgggaagagtacgacgtgttggacaaacggaga
ggccgcgacccagaaatgggcggcaagcctcgcaggaaaaacccccaggagggactgtacaatgagttgcagaaagataag
atggcagaagcttatagcgagatcggaatgaagggggaaaggagacgagggaaaggacacgacggcctttatcagggcctg
tccacagcaacaaaagatacgtatgacgccctccatatgcaggcacttccaccacggtgataa
(amino acids)
(SEQ ID NO: 593)
TTTPAPRPPTPAPTIASQPLSLRPEACRPAAGGAVHTRGLDFACDIYIWAPLAGTCGVLLLSLVITLYCRVKFSRSADAP
AYKQGQNQLYNELNLGRREEYDVLDKRRGRDPEMGGKPRRKNPQEGLYNELQKDKMAEAYSEIGMKGERRRGKGHDGLYQ
GLSTATKDTYDALHMQALPPR**
CD8/CD28/CD3z sequence:
N-CD8 transmembrane-CD28-CD3zeta-C
(DNA)
(SEQ ID NO: 594)
acgacaaccccggcccccagaccaccaacgccagcccccaccatcgccagccaacccctgtctctgagaccagaagcctgt
aggcctgccgccggtggagctgtgcacacaagaggactggatttcgcctgtgatatctacatttgggccccgctcgcaggc
acatgtggagtgctcctcctctccctggtgattaccctgtactgcagaagcaagcggtctcggctcctgcattctgattac
atgaacatgaccccaagaagaccaggccccaccaggaaacattaccagccctacgctccgccacgcgacttcgctgcctac
cggtcccgcgttaagttctcccgatcagccgacgcgcctgcttacaagcagggccagaaccaactgtacaacgagctgaat
ctcggtagacgggaagagtacgacgtgttggacaaacggagaggccgcgacccagaaatgggcggcaagcctcgcaggaaa
aacccccaggagggactgtacaatgagttgcagaaagataagatggcagaagcttatagcgagatcggaatgaagggggaa
aggagacgagggaaaggacacgacggcctttatcagggcctgtccacagcaacaaaagatacgtatgacgccctccatatg
caggcacttccaccacggtgataa
(amino acids)
(SEQ ID NO: 595)
TTTPAPRPPTPAPTIASQPLSLRPEACRPAAGGAVHTRGLDFACDIYIWAPLAGTCGVLLLSLVITLYCRSKRSRLLHSD
YMNMT PRRPGPTRKHYQPYAPPRDFAAYRSRVKFSRSADAPAYKQGQNQLYNELNLGRREEYDVLDKRRGRDPEMGGKPR
RKNPQEGLYNELQKDKMAEAYSEIGMKGERRRGKGHDGLYQGLSTATKDTYDALHMQALPPR**
CD8/4-1BB/CD3z sequence:
N-CD8 transmembrane-4-1BB-CD3zeta-C
(DNA)
(SEQ ID NO: 596)
acgacaaccccggcccccagaccaccaacgccagcccccaccatcgccagccaacccctgtctctgagaccagaagcctgt
aggcctgccgccggtggagctgtgcacacaagaggactggatttcgcctgtgatatctacatttgggccccgctcgcaggc
acatgtggagtgctcctcctctccctggtgattaccctgtactgcaaaaggggccgcaaaaaactcctttacatttttaag
cagccttttatgaggccagtacagacgactcaagaggaagacgggtgctcatgccgctttcctgaggaggaggaaggaggg
tgcgaactgcgcgttaagttctcccgatcagccgacgcgcctgcttacaagcagggccagaaccaactgtacaacgagctg
aatctcggtagacgggaagagtacgacgtgttggacaaacggagaggccgcgacccagaaatgggcggcaagcctcgcagg
aaaaacccccaggagggactgtacaatgagttgcagaaagataagatggcagaagcttatagcgagatcggaatgaagggg
gaaaggagacgagggaaaggacacgacggcctttatcagggcctgtccacagcaacaaaagatacgtatgacgccctccat
atgcaggcacttccaccacggtgataa
(amino acids)
(SEQ ID NO: 597)
TTTPAPRPPTPAPTIASQPLSLRPEACRPAAGGAVHTRGLDFACDIYIWAPLAGTCGVLLLSLVITLYCKRGRKKLLYIF
KQPFMRPVQTTQEEDGCSCRFPEEEEGGCELRVKFSRSADAPAYKQGQNQLYNELNLGRREEYDVLDKRRGRDPEMGGKP
RRKNPQEGLYNELQKDKMAEAYSEIGMKGERRRGKGHDGLYQGLSTATKDTYDALHMQALPPR**
CD8/CD28/4-1BB/CD3z sequence:
N-CD8 transmembrane-CD28-4-1BB-CD3zeta-C
(DNA)
(SEQ ID NO: 598)
acgacaaccccggcccccagaccaccaacgccagcccccaccatcgccagccaacccctgtctctgagaccagaagcctgt
aggcctgccgccggtggagctgtgcacacaagaggactggatttcgcctgtgatatctacatttgggccccgctcgcaggc
acatgtggagtgctcctcctctccctggtgattaccctgtactgcagaagcaagcggtctcggctcctgcattctgattac
atgaacatgaccccaagaagaccaggccccaccaggaaacattaccagccctacgctccgccacgcgacttcgctgcctac
cggtccaaaaggggccgcaaaaaactcctttacatttttaagcagccttttatgaggccagtacagacgactcaagaggaa
gacgggtgctcatgccgctttcctgaggaggaggaaggagggtgcgaactgcgcgttaagttctcccgatcagccgacgcg
cctgcttacaagcagggccagaaccaactgtacaacgagctgaatctcggtagacgggaagagtacgacgtgttggacaaa
cggagaggccgcgacccagaaatgggcggcaagcctcgcaggaaaaacccccaggagggactgtacaatgagttgcagaaa
gataagatggcagaagcttatagcgagatcggaatgaagggggaaaggagacgagggaaaggacacgacggcctttatcag
ggcctgtccacagcaacaaaagatacgtatgacgccctccatatgcaggcacttccaccacggtgataa
(amino acids)
(SEQ ID NO: 599)
TTTPAPRPPTPAPTIASQPLSLRPEACRPAAGGAVHTRGLDFACDIYIWAPLAGTCGVLLLSLVITLYCRSKRSRLLHSD
YMNMTPRRPGPTRKHYQPYAPPRDFAAYRSKRGRKKLLYIFKQPFMRPVQTTQEEDGCSCRFPEEEEGGCELRVKESRSA
DAPAYKQGQNQLYNELNLGRREEYDVLDKRRGRDPEMGGKPRRKNPQEGLYNELQKDKMAEAYSEIGMKGERRRGKGHDG
LYQGLSTATKDTYDALHMQALPPR**
CAR-T C3 CD8/CD8/4-1BB/CD3z sequence:
N-CD8ls-huMNC3scFv-CD8ecd fragment-CD8 transmembrane-4-1BB-CD3zeta-C
(DNA)
(SEQ ID NO: 600)
atggccctgcccgtgaccgctttgctgctccccctggcgctgctgctgcacgccgccaggccacaggttcagctggtgcag
tctggagctgaggtgaagaagcctggggcctcagtgaaggtctcctgcaaggcttctggttacacctttaccgactacgcc
atgaactgggtgcgacaggcccctggacaagggcttgagtggatgggagtgatcagcaccttcagcggtaacacaaacttc
aaccagaagttcaagggcagagtcaccatgaccacagacacatccacgagcacagcctacatggagctgaggagcctgaga
tctgacgacacggccgtgtattactgtgcgagaagcgactactacggcccatacttcgactactggggccagggcaccacc
ctgaccgtgtccagcggcggtggcggatccggcggtggcggatccggcggtggcggatccgatattgtgatgacccagact
ccactctctctgtccgtcacccctggacagccggcctccatctcctgcaggtctagtcagaccattgtccatagtaatgga
aacacctatttggagtggtacctgcagaagccaggccagtctccacagctcctgatctataaggtttccaaccggttctct
ggagtgccagataggttcagtggcagcgggtcagggacagatttcacactgaaaatcagccgggtggaggctgaggatgtt
ggggtttattactgcttccaaggtagccacgtgcctttcaccttcggcggagggaccaaggtggagatcaaacgaactacg
acaaccccggcccccagaccaccaacgccagcccccaccatcgccagccaacccctgtctctgagaccagaagcctgtagg
cctgccgccggtggagctgtgcacacaagaggactggatttcgcctgtgatatctacatttgggccccgctcgcaggcaca
tgtggagtgctcctcctctccctggtgattaccctgtactgcaaaaggggccgcaaaaaactcctttacatttttaagcag
ccttttatgaggccagtacagacgactcaagaggaagacgggtgctcatgccgctttcctgaggaggaggaaggagggtgc
gaactgcgcgttaagttctcccgatcagccgacgcgcctgcttacaagcagggccagaaccaactgtacaacgagctgaat
ctcggtagacgggaagagtacgacgtgttggacaaacggagaggccgcgacccagaaatgggcggcaagcctcgcaggaaa
aacccccaggagggactgtacaatgagttgcagaaagataagatggcagaagcttatagcgagatcggaatgaagggggaa
aggagacgagggaaaggacacgacggcctttatcagggcctgtccacagcaacaaaagatacgtatgacgccctccatatg
caggcacttccaccacggtgataa
(amino acids)
(SEQ ID NO: 601)
QVQLVQSGAEVKKPGASVKVSCKASGYTFTDYAMNWVRQAPGQGLEWMGVISTFSGNTNFNQKFKGRVTMTTDTSTSTAY
MELRSLRSDDTAVYYCARSDYYGPYFDYWGQGTTLTVSSGGGGSGGGGSGGGGSDIVMTQTPLSLSVTPGQPASISCRSS
QTIVHSNGNTYLEWYLQKPGQSPQLLIYKVSNRFSGVPDRFSGSGSGTDFTLKISRVEAEDVGVYYCFQGSHVPFTFGGG
TKVEIKRTTTTPAPRPPTPAPTIASQPLSLRPEACRPAAGGAVHTRGLDFACDIYIWAPLAGTCGVLLLSLVITLYCKRG
RKKLLYIFKQPFMRPVQTTQEEDGCSCRFPEEEEGGCELRVKFSRSADAPAYKQGQNQLYNELNLGRREEYDVLDKRRGR
DPEMGGKPRRKNPQEGLYNELQKDKMAEAYSEIGMKGERRRGKGHDGLYQGLSTATKDTYDALHMQALPPR**
C3 CAR gBLOCK 1 sequence:
(DNA)
(SEQ ID NO: 602)
atccacgctgttttgacctccatagaagattctagagctagctgtagagcttggtaccgagggccaccatggccctgcccg
tgaccgctttgctgctccccctggcgctgctgctgcacgccgccaggccacaggttcagctggtgcagtctggagctgagg
tgaagaagcctggggcctcagtgaaggtctcctgcaaggcttctggttacacctttaccgactacgccatgaactgggtgc
gacaggcccctggacaagggcttgagtggatgggagtgatcagcaccttcagcggtaacacaaacttcaaccagaagttca
agggcagagtcaccatgaccacagacacatccacgagcacagcctacatggagctgaggagcctgagatctgacgacacgg
ccgtgtattactgtgcgagaagcgactactacggcccatacttcgactactggggccagggcaccaccctgaccgtgtcca
gcggcggtggcggatccggcggtggcggatccggcggtggcggatccgatattgtgatgacccagactccactctctctgt
C3 CAR gBLOCK 2 sequence:
(DNA)
(SEQ ID NO: 603)
tattgtgatgacccagactccactctctctgtccgtcacccctggacagccggcctccatctcctgcaggtctagtcagac
cattgtccatagtaatggaaacacctatttggagtggtacctgcagaagccaggccagtctccacagctcctgatctataa
ggtttccaaccggttctctggagtgccagataggttcagtggcagcgggtcagggacagatttcacactgaaaatcagccg
ggtggaggctgaggatgttggggtttattactgcttccaaggtagccacgtgcctttcaccttcggcggagggaccaaggt
ggagatcaaacgaactacgacaaccccggcccccagaccaccaacgccagcccccaccatcgccagccaacccctgtctct
gagaccagaagcctgtaggcctgccgccggtggagctgtgcacacaagaggactggatttcgcctgtgatatctacatttg
ggccccgctcgcaggcacatgtg
E6 scFV gBLOCK 1 sequence:
(DNA)
(SEQ ID NO: 604)
tgctctgggttccaggttccactggtgacgcggcccagccggccgaggtgcagctggtggagtctgggggaggcctggtca
agcctggggggtccctgagactctcctgtgcagcctctggattcaccttcagtaggtatggcatgagctgggtccgccagg
ctccagggaagaggctggagtgggtctcaaccattagtggcggaggcacctacatatactacccagactcagtgaagggcc
gattcaccatctccagagacaacgccaagaacaccctgtatctgcaaatgaacagcctgagagccgaggacacggctgtgt
attactgtaccagagataactatggccgcaactatgattatggcatggattattggggccagggcaccctggtgaccgtga
gcagcggcggtggcggatccggcggtggcggatccggcggtggcggatcc
E6 scFV gBLOCK 2 sequence:
(DNA)
(SEQ ID NO: 605)
ggcggtggcggatccggcggtggcggatccggcggtggcggatccgaaattgtgttgacacagtctccagccaccctgtct
ttgtctccaggggaaagagccaccctcacctgcagcgccaccagcagtgttagctacatccactggtaccaacagaggcct
ggccagagccccaggctcctcatctatagcacctccaacctggccagcggcatcccagccaggttcagtggcagtgggtct
gggagcgactacactctcaccatcagcagcctagagcctgaagattttgcagtttattactgtcagcagcgtagcagctcc
cctttcacctttggcagcggcaccaaagtggaaattaaaaccggtcatcatcaccatcaccactgataagtttaaacccgc
tgatcagcctcgactgtgccttctagt
CAR-T C2 CD8/CD8/CD3z sequence:
N-CD8ls-huMNC2scFv-CD8ecd fragment-CD8 transmembrane-CD3zeta-C
(DNA)
(SEQ ID NO: 606)
atggccttgccagtgacggccctgctgctgccattggctcttctgttgcacgctgccaggcctgaagtgcagctcgtagag
agtggcgggggactggtgaagcccggtggaagcctcagactcagttgcgccgcctcaggtttcactttttcaggttacgcc
atgtcctgggtaagacaggcaccggggaaaggactcgagtgggtgtctactatcagctcaggaggcacttatatatattat
cctgactctgtaaaaggccgatttacgatttctcgcgacaatgcaaagaactccctctacctccaaatgaacagtcttagg
gcagaagacactgctgtatactattgtgcacgcctcggcggcgacaactactacgagtactttgacgtgtgggggaaaggg
actaccgtgacagtttcaagcggaggaggtggctcaggtggaggcgggtcaggggggggaggaagtgatattgtgctcaca
caatccccagcctccctggctgtgtctcccggccaacgcgctacaattacatgtcgggcctccaaaagcgtgagcaccagc
ggctacagctacatgcactggtatcaacagaaaccaggacaaccccccaaactgttgatttatctcgcttcaaacttggag
tccggcgtgcctgcgcgcttttcagggagtgggagcggcacagattttacgctgactatcaaccccgtagaagcaaacgat
acagcgaattattattgtcaacattcccgggaactcccctttacgttcggcgggggcacaaaggtcgaaattaagagaacc
acgacaaccccggcccccagaccaccaacgccagcccccaccatcgccagccaacccctgtctctgagaccagaagcctgt
aggcctgccgccggtggagctgtgcacacaagaggactggatttcgcctgtgatatctacatttgggccccgctcgcaggc
acatgtggagtgctcctcctctccctggtgattaccctgtactgccgcgttaagttctcccgatcagccgacgcgcctgct
tacaagcagggccagaaccaactgtacaacgagctgaatctcggtagacgggaagagtacgacgtgttggacaaacggaga
ggccgcgacccagaaatgggcggcaagcctcgcaggaaaaacccccaggagggactgtacaatgagttgcagaaagataag
atggcagaagcttatagcgagatcggaatgaagggggaaaggagacgagggaaaggacacgacggcctttatcagggcctg
tccacagcaacaaaagatacgtatgacgccctccatatgcaggcacttccaccacggtgataa
(amino acids)
(SEQ ID NO: 607)
MALPVTALLLPLALLLHAARPEVQLVESGGGLVKPGGSLRLSCAASGFTFSGYAMSWVRQAPGKGLEWVSTISSGGTYIY
YPDSVKGRFTISRDNAKNSLYLQMNSLRAEDTAVYYCARLGGDNYYEYFDVWGKGTTVTVSSGGGGSGGGGSGGGGSDIV
LTQSPASLAVSPGQRATITCRASKSVSTSGYSYMHWYQQKPGQPPKLLIYLASNLESGVPARFSGSGSGTDFTLTINPVE
ANDTANYYCQHSRELPFTFGGGTKVEIKRTTTTPAPRPPTPAPTIASQPLSLRPEACRPAAGGAVHTRGLDFACDIYIWA
PLAGTCGVLLLSLVITLYCRVKFSRSADAPAYKQGQNQLYNELNLGRREEYDVLDKRRGRDPEMGGKPRRKNPQEGLYNE
LQKDKMAEAYSEIGMKGERRRGKGHDGLYQGLSTATKDTYDALHMQALPPR**
CAR-T C2 CD8/CD8/CD28/CD3z sequence:
N-CD8ls-huMNC2scFv-CD8ecd fragment-CD8 transmembrane-CD28-CD3zeta-C
(DNA)
(SEQ ID NO: 608)
atggccttgccagtgacggccctgctgctgccattggctcttctgttgcacgctgccaggcctgaagtgcagctcgtagag
agtggcgggggactggtgaagcccggtggaagcctcagactcagttgcgccgcctcaggtttcactttttcaggttacgcc
atgtcctgggtaagacaggcaccggggaaaggactcgagtgggtgtctactatcagctcaggaggcacttatatatattat
cctgactctgtaaaaggccgatttacgatttctcgcgacaatgcaaagaactccctctacctccaaatgaacagtcttagg
gcagaagacactgctgtatactattgtgcacgcctcggcggcgacaactactacgagtactttgacgtgtgggggaaaggg
actaccgtgacagtttcaagcggaggaggtggctcaggtggaggcgggtcaggggggggaggaagtgatattgtgctcaca
caatccccagcctccctggctgtgtctcccggccaacgcgctacaattacatgtcgggcctccaaaagcgtgagcaccagc
ggctacagctacatgcactggtatcaacagaaaccaggacaaccccccaaactgttgatttatctcgcttcaaacttggag
tccggcgtgcctgcgcgcttttcagggagtgggagcggcacagattttacgctgactatcaaccccgtagaagcaaacgat
acagcgaattattattgtcaacattcccgggaactcccctttacgttcggcgggggcacaaaggtcgaaattaagagaacc
acgacaaccccggcccccagaccaccaacgccagcccccaccatcgccagccaacccctgtctctgagaccagaagcctgt
aggcctgccgccggtggagctgtgcacacaagaggactggatttcgcctgtgatatctacatttgggccccgctcgcaggc
acatgtggagtgctcctcctctccctggtgattaccctgtactgcagaagcaagcggtctcggctcctgcattctgattac
atgaacatgaccccaagaagaccaggccccaccaggaaacattaccagccctacgctccgccacgcgacttcgctgcctac
cggtcccgcgttaagttctcccgatcagccgacgcgcctgcttacaagcagggccagaaccaactgtacaacgagctgaat
ctcggtagacgggaagagtacgacgtgttggacaaacggagaggccgcgacccagaaatgggcggcaagcctcgcaggaaa
aacccccaggagggactgtacaatgagttgcagaaagataagatggcagaagcttatagcgagatcggaatgaagggggaa
aggagacgagggaaaggacacgacggcctttatcagggcctgtccacagcaacaaaagatacgtatgacgccctccatatg
caggcacttccaccacggtgataa
(amino acids)
(SEQ ID NO: 609)
MALPVTALLLPLALLLHAARPEVQLVESGGGLVKPGGSLRLSCAASGFTFSGYAMSWVRQAPGKGLEWVSTISSGGTYIY
YPDSVKGRFTISRDNAKNSLYLQMNSLRAEDTAVYYCARLGGDNYYEYFDVWGKGTTVTVSSGGGGSGGGGSGGGGSDIV
LTQSPASLAVSPGQRATITCRASKSVSTSGYSYMHWYQQKPGQPPKLLIYLASNLESGVPARFSGSGSGTDFTLTINPVE
ANDTANYYCQHSRELPFTFGGGTKVEIKRTTTTPAPRPPTPAPTIASQPLSLRPEACRPAAGGAVHTRGLDFACDIYIWA
PLAGTCGVLLLSLVITLYCRSKRSRLLHSDYMNMTPRRPGPTRKHYQPYAPPRDFAAYRSRVKFSRSADAPAYKQGQNQL
YNELNLGRREEYDVLDKRRGRDPEMGGKPRRKNPQEGLYNELQKDKMAEAYSEIGMKGERRRGKGHDGLYQGLSTATKDT
YDALHMQALPPR**
CAR-T C2 CD8/CD8/4-1BB/CD3z sequence #13:
N-CD8ls-huMNC2scFv-CD8ecd fragment-CD8 transmembrane-4-1BB-CD3zeta-C
(DNA)
(SEQ ID NO: 610)
atggccttgccagtgacggccctgctgctgccattggctcttctgttgcacgctgccaggcctgaagtgcagctcgtagag
agtggcgggggactggtgaagcccggtggaagcctcagactcagttgcgccgcctcaggtttcactttttcaggttacgcc
atgtcctgggtaagacaggcaccggggaaaggactcgagtgggtgtctactatcagctcaggaggcacttatatatattat
cctgactctgtaaaaggccgatttacgatttctcgcgacaatgcaaagaactccctctacctccaaatgaacagtcttagg
gcagaagacactgctgtatactattgtgcacgcctcggcggcgacaactactacgagtactttgacgtgtgggggaaaggg
actaccgtgacagtttcaagcggaggaggtggctcaggtggaggcgggtcaggggggggaggaagtgatattgtgctcaca
caatccccagcctccctggctgtgtctcccggccaacgcgctacaattacatgtcgggcctccaaaagcgtgagcaccagc
ggctacagctacatgcactggtatcaacagaaaccaggacaaccccccaaactgttgatttatctcgcttcaaacttggag
tccggcgtgcctgcgcgcttttcagggagtgggagcggcacagattttacgctgactatcaaccccgtagaagcaaacgat
acagcgaattattattgtcaacattcccgggaactcccctttacgttcggcgggggcacaaaggtcgaaattaagagaacc
acgacaaccccggcccccagaccaccaacgccagcccccaccatcgccagccaacccctgtctctgagaccagaagcctgt
aggcctgccgccggtggagctgtgcacacaagaggactggatttcgcctgtgatatctacatttgggccccgctcgcaggc
acatgtggagtgctcctcctctccctggtgattaccctgtactgcaaaaggggccgcaaaaaactcctttacatttttaag
cagccttttatgaggccagtacagacgactcaagaggaagacgggtgctcatgccgctttcctgaggaggaggaaggaggg
tgcgaactgcgcgttaagttctcccgatcagccgacgcgcctgcttacaagcagggccagaaccaactgtacaacgagctg
aatctcggtagacgggaagagtacgacgtgttggacaaacggagaggccgcgacccagaaatgggcggcaagcctcgcagg
aaaaacccccaggagggactgtacaatgagttgcagaaagataagatggcagaagcttatagcgagatcggaatgaagggg
gaaaggagacgagggaaaggacacgacggcctttatcagggcctgtccacagcaacaaaagatacgtatgacgccctccat
atgcaggcacttccaccacggtgataa
(amino acids)
(SEQ ID NO: 611)
MALPVTALLLPLALLLHAARPEVQLVESGGGLVKPGGSLRLSCAASGFTFSGYAMSWVRQAPGKGLEWVSTISSGGTYIY
YPDSVKGRFTISRDNAKNSLYLQMNSLRAEDTAVYYCARLGGDNYYEYFDVWGKGTTVTVSSGGGGSGGGGSGGGGSDIV
LTQSPASLAVSPGQRATITCRASKSVSTSGYSYMHWYQQKPGQPPKLLIYLASNLESGVPARFSGSGSGTDFTLTINPVE
ANDTANYYCQHSRELPFTFGGGTKVEIKRTTTTPAPRPPTPAPTIASQPLSLRPEACRPAAGGAVHTRGLDFACDIYIWA
PLAGTCGVLLLSLVITLYCKRGRKKLLYIFKQPFMRPVQTTQEEDGCSCRFPEEEEGGCELRVKFSRSADAPAYKQGQNQ
LYNELNLGRREEYDVLDKRRGRDPEMGGKPRRKNPQEGLYNELQKDKMAEAYSEIGMKGERRRGKGHDGLYQGLSTATKD
TYDALHMQALPPR**
CAR-T C2 CD8/CD8/OX40/CD3z sequence:
N-CD8ls-huMNC2scFv-CD8ecd fragment-CD8 transmembrane-OX40-CD3zeta-C
(DNA)
(SEQ ID NO: 612)
atggccttgccagtgacggccctgctgctgccattggctcttctgttgcacgctgccaggcctgaagtgcagctcgtagag
agtggcgggggactggtgaagcccggtggaagcctcagactcagttgcgccgcctcaggtttcactttttcaggttacgcc
atgtcctgggtaagacaggcaccggggaaaggactcgagtgggtgtctactatcagctcaggaggcacttatatatattat
cctgactctgtaaaaggccgatttacgatttctcgcgacaatgcaaagaactccctctacctccaaatgaacagtcttagg
gcagaagacactgctgtatactattgtgcacgcctcggcggcgacaactactacgagtactttgacgtgtgggggaaaggg
actaccgtgacagtttcaagcggaggaggtggctcaggtggaggcgggtcaggggggggaggaagtgatattgtgctcaca
caatccccagcctccctggctgtgtctcccggccaacgcgctacaattacatgtcgggcctccaaaagcgtgagcaccagc
ggctacagctacatgcactggtatcaacagaaaccaggacaaccccccaaactgttgatttatctcgcttcaaacttggag
tccggcgtgcctgcgcgcttttcagggagtgggagcggcacagattttacgctgactatcaaccccgtagaagcaaacgat
acagcgaattattattgtcaacattcccgggaactcccctttacgttcggcgggggcacaaaggtcgaaattaagagaacc
acgacaaccccggcccccagaccaccaacgccagcccccaccatcgccagccaacccctgtctctgagaccagaagcctgt
aggcctgccgccggtggagctgtgcacacaagaggactggatttcgcctgtgatatctacatttgggccccgctcgcaggc
acatgtggagtgctcctcctctccctggtgattaccctgtactgccggagggaccagaggctgccccccgatgcccacaag
ccccctgggggaggcagtttccggacccccatccaagaggagcaggccgacgcccactccaccctggccaagatccgcgtt
aagttctcccgatcagccgacgcgcctgcttacaagcagggccagaaccaactgtacaacgagctgaatctcggtagacgg
gaagagtacgacgtgttggacaaacggagaggccgcgacccagaaatgggcggcaagcctcgcaggaaaaacccccaggag
ggactgtacaatgagttgcagaaagataagatggcagaagcttatagcgagatcggaatgaagggggaaaggagacgaggg
aaaggacacgacggcctttatcagggcctgtccacagcaacaaaagatacgtatgacgccctccatatgcaggcacttcca
ccacggtgataa
(amino acids)
(SEQ ID NO: 613)
MALPVTALLLPLALLLHAARPEVQLVESGGGLVKPGGSLRLSCAASGFTFSGYAMSWVRQAPGKGLEWVSTISSGGTYIY
YPDSVKGRFTISRDNAKNSLYLQMNSLRAEDTAVYYCARLGGDNYYEYFDVWGKGTTVTVSSGGGGSGGGGSGGGGSDIV
LTQSPASLAVSPGQRATITCRASKSVSTSGYSYMHWYQQKPGQPPKLLIYLASNLESGVPARFSGSGSGTDFTLTINPVE
ANDTANYYCQHSRELPFTFGGGTKVEIKRTTTTPAPRPPTPAPTIASQPLSLRPEACRPAAGGAVHTRGLDFACDIYIWA
PLAGTCGVLLLSLVITLYCRRDQRLPPDAHKPPGGGSFRTPIQEEQADAHSTLAKIRVKFSRSADAPAYKQGQNQLYNEL
NLGRREEYDVLDKRRGRDPEMGGKPRRKNPQEGLYNELQKDKMAEAYSEIGMKGERRRGKGHDGLYQGLSTATKDTYDAL
HMQALPPR**
CAR-T C2 CD8/CD8/CD28/0X40/CD3z sequence:
N-CD8ls-huMNC2scFv-CD8ecd fragment-CD8 transmembrane-CD28-OX40-CD3zeta-C
(DNA)
(SEQ ID NO: 614)
atggccttgccagtgacggccctgctgctgccattggctcttctgttgcacgctgccaggcctgaagtgcagctcgtagag
agtggcgggggactggtgaagcccggtggaagcctcagactcagttgcgccgcctcaggtttcactttttcaggttacgcc
atgtcctgggtaagacaggcaccggggaaaggactcgagtgggtgtctactatcagctcaggaggcacttatatatattat
cctgactctgtaaaaggccgatttacgatttctcgcgacaatgcaaagaactccctctacctccaaatgaacagtcttagg
gcagaagacactgctgtatactattgtgcacgcctcggcggcgacaactactacgagtactttgacgtgtgggggaaaggg
actaccgtgacagtttcaagcggaggaggtggctcaggtggaggcgggtcaggggggggaggaagtgatattgtgctcaca
caatccccagcctccctggctgtgtctcccggccaacgcgctacaattacatgtcgggcctccaaaagcgtgagcaccagc
ggctacagctacatgcactggtatcaacagaaaccaggacaaccccccaaactgttgatttatctcgcttcaaacttggag
tccggcgtgcctgcgcgcttttcagggagtgggagcggcacagattttacgctgactatcaaccccgtagaagcaaacgat
acagcgaattattattgtcaacattcccgggaactcccctttacgttcggcgggggcacaaaggtcgaaattaagagaacc
acgacaaccccggcccccagaccaccaacgccagcccccaccatcgccagccaacccctgtctctgagaccagaagcctgt
aggcctgccgccggtggagctgtgcacacaagaggactggatttcgcctgtgatatctacatttgggccccgctcgcaggc
acatgtggagtgctcctcctctccctggtgattaccctgtactgcagaagcaagcggtctcggctcctgcattctgattac
atgaacatgaccccaagaagaccaggccccaccaggaaacattaccagccctacgctccgccacgcgacttcgctgcctac
cggtcccggagggaccagaggctgccccccgatgcccacaagccccctgggggaggcagtttccggacccccatccaagag
gagcaggccgacgcccactccaccctggccaagatccgcgttaagttctcccgatcagccgacgcgcctgcttacaagcag
ggccagaaccaactgtacaacgagctgaatctcggtagacgggaagagtacgacgtgttggacaaacggagaggccgcgac
ccagaaatgggcggcaagcctcgcaggaaaaacccccaggagggactgtacaatgagttgcagaaagataagatggcagaa
gcttatagcgagatcggaatgaagggggaaaggagacgagggaaaggacacgacggcctttatcagggcctgtccacagca
acaaaagatacgtatgacgccctccatatgcaggcacttccaccacggtgataa
(amino acids)
(SEQ ID NO: 615)
MALPVTALLLPLALLLHAARPEVQLVESGGGLVKPGGSLRLSCAASGFTFSGYAMSWVRQAPGKGLEWVSTISSGGTYIY
YPDSVKGRFTISRDNAKNSLYLQMNSLRAEDTAVYYCARLGGDNYYEYFDVWGKGTTVTVSSGGGGSGGGGSGGGGSDIV
LTQSPASLAVSPGQRATITCRASKSVSTSGYSYMHWYQQKPGQPPKLLIYLASNLESGVPARFSGSGSGTDFTLTINPVE
ANDTANYYCQHSRELPFTFGGGTKVEIKRTTTTPAPRPPTPAPTIASQPLSLRPEACRPAAGGAVHTRGLDFACDIYIWA
PLAGTCGVLLLSLVITLYCRSKRSRLLHSDYMNMTPRRPGPTRKHYQPYAPPRDFAAYRSRRDQRLPPDAHKPPGGGSFR
TPIQEEQADAHSTLAKIRVKFSRSADAPAYKQGQNQLYNELNLGRREEYDVLDKRRGRDPEMGGKPRRKNPQEGLYNELQ
KDKMAEAYSEIGMKGERRRGKGHDGLYQGLSTATKDTYDALHMQALPPR**
CAR-T E6 CD8/CD8/OX40/CD3z sequence:
N-CD8ls-huMNE6scFv-CD8ecd fragment-CD8 transmembrane-OX40-CD3zeta-C
(DNA)
(SEQ ID NO: 616)
atggccctgcccgtgaccgctttgctgctccccctggcgctgctgctgcacgccgccaggccagaggtccagctggttgag
agtggcggtgggctggttaagcctggcggctccctgcggctgagctgcgccgcgagtggatttactttcagccgatatggg
atgagttgggtgcggcaagctcccgggaagaggctggaatgggtctcaacaatctccggggggggcacttacatctattac
cccgactcagtcaaggggagatttaccatttcacgagacaacgctaagaataccctgtatttgcagatgaattctctgaga
gcagaggacacagctgtttactattgtacccgcgacaactatggcaggaactacgactacggtatggactattggggacaa
gggacattggttacagtgagcagtggcggcgggggcagcggaggaggaggcagcggtggggggggcagcgagatagtgctc
acgcagtcacccgcgactctcagtctctcacctggggaacgagctaccctgacgtgctctgctacctcctcagtgtcatat
attcactggtatcagcaacggcccgggcagtcccctagattgctcatttatagtacctctaatctggcctcaggtatccct
gcacgattttctggatctggttcaggttctgattacaccctcactatctctagcctggagcctgaagactttgccgtttat
tactgccagcagaggtctagctccccattcacctttgggagtgggaccaaggttgaaattaaaacgacaaccccggccccc
agaccaccaacgccagcccccaccatcgccagccaacccctgtctctgagaccagaagcctgtaggcctgccgccggtgga
gctgtgcacacaagaggactggatttcgcctgtgatatctacatttgggccccgctcgcaggcacatgtggagtgctcctc
ctctccctggtgattaccctgtactgccggagggaccagaggctgccccccgatgcccacaagccccctgggggaggcagt
ttccggacccccatccaagaggagcaggccgacgcccactccaccctggccaagatccgcgttaagttctcccgatcagcc
gacgcgcctgcttacaagcagggccagaaccaactgtacaacgagctgaatctcggtagacgggaagagtacgacgtgttg
gacaaacggagaggccgcgacccagaaatgggcggcaagcctcgcaggaaaaacccccaggagggactgtacaatgagttg
cagaaagataagatggcagaagcttatagcgagatcggaatgaagggggaaaggagacgagggaaaggacacgacggcctt
tatcagggcctgtccacagcaacaaaagatacgtatgacgccctccatatgcaggcacttccaccacggtgataa
(amino acids)
(SEQ ID NO: 617)
MALPVTALLLPLALLLHAARPEVQLVESGGGLVKPGGSLRLSCAASGFTFSRYGMSWVRQAPGKRLEWVSTISGGGTYIY
YPDSVKGRFTISRDNAKNTLYLQMNSLRAEDTAVYYCTRDNYGRNYDYGMDYWGQGTLVTVSSGGGGSGGGGSGGGGSEI
VLTQSPATLSLSPGERATLTCSATSSVSYIHWYQQRPGQSPRLLIYSTSNLASGIPARFSGSGSGSDYTLTISSLEPEDF
AVYYCQQRSSSPFTFGSGTKVEIKTTTPAPRPPTPAPTIASQPLSLRPEACRPAAGGAVHTRGLDFACDIYIWAPLAGTC
GVLLLSLVITLYCRRDQRLPPDAHKPPGGGSFRTPIQEEQADAHSTLAKIRVKFSRSADAPAYKQGQNQLYNELNLGRRE
EYDVLDKRRGRDPEMGGKPRRKNPQEGLYNELQKDKMAEAYSEIGMKGERRRGKGHDGLYQGLSTATKDTYDALHMQALP
PR**
CAR-T E6 CD8/CD8/CD28/0X40/CD3z sequence:
N-CD81s-huMNC2scFv-CD8ecd fragment-CD8 transmembrane-CD28-OX40-CD3zeta-C
(DNA)
(SEQ ID NO: 618)
atggccctgcccgtgaccgctttgctgctccccctggcgctgctgctgcacgccgccaggccagaggtccagctggttgag
agtggcggtgggctggttaagcctggcggctccctgcggctgagctgcgccgcgagtggatttactttcagccgatatggg
atgagttgggtgcggcaagctcccgggaagaggctggaatgggtctcaacaatctccggggggggcacttacatctattac
cccgactcagtcaaggggagatttaccatttcacgagacaacgctaagaataccctgtatttgcagatgaattctctgaga
gcagaggacacagctgtttactattgtacccgcgacaactatggcaggaactacgactacggtatggactattggggacaa
gggacattggttacagtgagcagtggcggcgggggcagcggaggaggaggcagcggtggggggggcagcgagatagtgctc
acgcagtcacccgcgactctcagtctctcacctggggaacgagctaccctgacgtgctctgctacctcctcagtgtcatat
attcactggtatcagcaacggcccgggcagtcccctagattgctcatttatagtacctctaatctggcctcaggtatccct
gcacgattttctggatctggttcaggttctgattacaccctcactatctctagcctggagcctgaagactttgccgtttat
tactgccagcagaggtctagctccccattcacctttgggagtgggaccaaggttgaaattaaaacgacaaccccggccccc
agaccaccaacgccagcccccaccatcgccagccaacccctgtctctgagaccagaagcctgtaggcctgccgccggtgga
gctgtgcacacaagaggactggatttcgcctgtgatatctacatttgggccccgctcgcaggcacatgtggagtgctcctc
ctctccctggtgattaccctgtactgcagaagcaagcggtctcggctcctgcattctgattacatgaacatgaccccaaga
agaccaggccccaccaggaaacattaccagccctacgctccgccacgcgacttcgctgcctaccggtcccggagggaccag
aggctgccccccgatgcccacaagccccctgggggaggcagtttccggacccccatccaagaggagcaggccgacgcccac
tccaccctggccaagatccgcgttaagttctcccgatcagccgacgcgcctgcttacaagcagggccagaaccaactgtac
aacgagctgaatctcggtagacgggaagagtacgacgtgttggacaaacggagaggccgcgacccagaaatgggcggcaag
cctcgcaggaaaaacccccaggagggactgtacaatgagttgcagaaagataagatggcagaagcttatagcgagatcgga
atgaagggggaaaggagacgagggaaaggacacgacggcctttatcagggcctgtccacagcaacaaaagatacgtatgac
gccctccatatgcaggcacttccaccacggtgataa
(amino acids)
(SEQ ID NO: 619)
MALPVTALLLPLALLLHAARPEVQLVESGGGLVKPGGSLRLSCAASGFTFSRYGMSWVRQAPGKRLEWVSTISGGGTYIY
YPDSVKGRFTISRDNAKNTLYLQMNSLRAEDTAVYYCTRDNYGRNYDYGMDYWGQGTLVTVSSGGGGSGGGGSGGGGSEI
VLTQSPATLSLSPGERATLTCSATSSVSYIHWYQQRPGQSPRLLIYSTSNLASGIPARFSGSGSGSDYTLTISSLEPEDF
AVYYCQQRSSSPFTFGSGTKVEIKTTTPAPRPPTPAPTIASQPLSLRPEACRPAAGGAVHTRGLDFACDIYIWAPLAGTC
GVLLLSLVITLYCRSKRSRLLHSDYMNMTPRRPGPTRKHYQPYAPPRDFAAYRSRRDQRLPPDAHKPPGGGSFRTPIQEE
QADAHSTLAKIRVKFSRSADAPAYKQGQNQLYNELNLGRREEYDVLDKRRGRDPEMGGKPRRKNPQEGLYNELQKDKMAE
AYSEIGMKGERRRGKGHDGLYQGLSTATKDTYDALHMQALPPR**
MUC1 truncated cytoplasmic sequence
(amino acids)
(SEQ ID NO: 620)
SNIKFRPGSVVVQLTLAFREGTINVHDVETQFNQYKTEAASRY
MUC1 truncated cytoplasmic sequence
(amino acids)
(SEQ ID NO: 621)
SVVVQLTLAFREGTINVHDVETQFNQYKTEAASRY
MUC1 truncated cytoplasmic sequence
(amino acids)
(SEQ ID NO: 622)
VQLTLAFREGTINVHDVETQFNQY
MUC1 truncated cytoplasmic sequence
(amino acids)
(SEQ ID NO: 623)
SNIKFRPGSVVVQLTLAFREGTIN
Primers
(SEQ ID NO: 624)
attctaagcttgggccaccatggaactg
(SEQ ID NO: 625)
tctagagtttaaacttactatttacccggagacagggagag
(SEQ ID NO: 626)
agtatggcccagccggccgaggtgcagctggtggagtctgg
(SEQ ID NO: 627)
tagaaggcacagtcgaggctgatcag
(SEQ ID NO: 628)
attctaagcttgggccaccatggaagc
(SEQ ID NO: 629)
tctagagtttaaacttactaacactctcccctgttgaagc
(SEQ ID NO: 630)
agtatggcccagccggccgaaattgtgttgacacagtctccag
(SEQ ID NO: 631)
tagaaggcacagtcgaggctgatcag
(SEQ ID NO: 632)
actgtcatatggaggtgcagctggtggagtctg
(SEQ ID NO: 633)
actgtctcgagtttaatttccactttggtgccgctgc
(SEQ ID NO: 634)
actgtcatatggaggtgcagctggtggagtctg
(SEQ ID NO: 635)
actgtaccggttttaatttccactttggtgccgctgc
(SEQ ID NO: 636)
cttcttcctcaggagcaagctcaccgtgg
(SEQ ID NO: 637)
gagccgtcggagtccagc
(SEQ ID NO: 638)
gcacctgaactcctgggg
(SEQ ID NO: 639)
tttaatttccactttggtgccg
(SEQ ID NO: 640)
cgcggctagcttaagcttggtaccgagggcca
(SEQ ID NO: 641)
cgcggcggccgcctgatcagcgggtttaaacttatc
MMP9
(DNA)
(SEQ ID NO: 642)
atgagcctctggcagcccctggtcctggtgctcctggtgctgggctgctgctttgctgcccccagacagcgccagtccacc
cttgtgctcttccctggagacctgagaaccaatctcaccgacaggcagctggcagaggaatacctgtaccgctatggttac
actcgggtggcagagatgcgtggagagtcgaaatctctggggcctgcgctgctgcttctccagaagcaactgtccctgccc
gagaccggtgagctggatagcgccacgctgaaggccatgcgaaccccacggtgcggggtcccagacctgggcagattccaa
acctttgagggcgacctcaagtggcaccaccacaacatcacctattggatccaaaactactcggaagacttgccgcgggcg
gtgattgacgacgcctttgcccgcgccttcgcactgtggagcgcggtgacgccgctcaccttcactcgcgtgtacagccgg
gacgcagacatcgtcatccagtttggtgtcgcggagcacggagacgggtatcccttcgacgggaaggacgggctcctggca
cacgcctttcctcctggccccggcattcagggagacgcccatttcgacgatgacgagttgtggtccctgggcaagggcgtc
gtggttccaactcggtttggaaacgcagatggcgcggcctgccacttccccttcatcttcgagggccgctcctactctgcc
tgcaccaccgacggtcgctccgacggcttgccctggtgcagtaccacggccaactacgacaccgacgaccggtttggcttc
tgccccagcgagagactctacacccaggacggcaatgctgatgggaaaccctgccagtttccattcatcttccaaggccaa
tcctactccgcctgcaccacggacggtcgctccgacggctaccgctggtgcgccaccaccgccaactacgaccgggacaag
ctcttcggcttctgcccgacccgagctgactcgacggtgatggggggcaactcggcgggggagctgtgcgtcttccccttc
actttcctgggtaaggagtactcgacctgtaccagcgagggccgcggagatgggcgcctctggtgcgctaccacctcgaac
tttgacagcgacaagaagtggggcttctgcccggaccaaggatacagtttgttcctcgtggcggcgcatgagttcggccac
gcgctgggcttagatcattcctcagtgccggaggcgctcatgtaccctatgtaccgcttcactgaggggccccccttgcat
aaggacgacgtgaatggcatccggcacctctatggtcctcgccctgaacctgagccacggcctccaaccaccaccacaccg
cagcccacggctcccccgacggtctgccccaccggaccccccactgtccacccctcagagcgccccacagctggccccaca
ggtcccccctcagctggccccacaggtccccccactgctggcccttctacggccactactgtgcctttgagtccggtggac
gatgcctgcaacgtgaacatcttcgacgccatcgcggagattgggaaccagctgtatttgttcaaggatgggaagtactgg
cgattctctgagggcagggggagccggccgcagggccccttccttatcgccgacaagtggcccgcgctgccccgcaagctg
gactcggtctttgaggagcggctctccaagaagcttttcttcttctctgggcgccaggtgtgggtgtacacaggcgcgtcg
gtgctgggcccgaggcgtctggacaagctgggcctgggagccgacgtggcccaggtgaccggggccctccggagtggcagg
gggaagatgctgctgttcagcgggcggcgcctctggaggttcgacgtgaaggcgcagatggtggatccccggagcgccagc
gaggtggaccggatgttccccggggtgcctttggacacgcacgacgtcttccagtaccgagagaaagcctatttctgccag
gaccgcttctactggcgcgtgagttcccggagtgagttgaaccaggtggaccaagtgggctacgtgacctatgacatcctg
cagtgccctgaggacgattacaaggatgacgacgataagtgataa
(amino acids)
(SEQ ID NO: 643)
MSLWQPLVLVLLVLGCCFAAPRQRQSTLVLFPGDLRTNLTDRQLAEEYLYRYGYTRVAEMRGESKSLGPALLLLQKQLSL
PETGELDSATLKAMRTPRCGVPDLGRFQTFEGDLKWHHHNITYWIQNYSEDLPRAVIDDAFARAFALWSAVTPLTFTRVY
SRDADIVIQFGVAEHGDGYPFDGKDGLLAHAFPPGPGIQGDAHEDDDELWSLGKGVVVPTRFGNADGAACHFPFIFEGRS
YSACTTDGRSDGLPWCSTTANYDTDDRFGFCPSERLYTQDGNADGKPCQFPFIFQGQSYSACTTDGRSDGYRWCATTANY
DRDKLFGFCPTRADSTVMGGNSAGELCVFPFTFLGKEYSTCTSEGRGDGRLWCATTSNEDSDKKWGFCPDQGYSLFLVAA
HEFGHALGLDHSSVPEALMYPMYRFTEGPPLHKDDVNGIRHLYGPRPEPEPRPPTTTTPQPTAPPTVCPTGPPTVHPSER
PTAGPTGPPSAGPTGPPTAGPSTATTVPLSPVDDACNVNIFDAIAEIGNQLYLFKDGKYWRFSEGRGSRPQGPFLIADKW
PALPRKLDSVFEERLSKKLFFFSGRQVWVYTGASVLGPRRLDKLGLGADVAQVTGALRSGRGKMLLFSGRRLWREDVKAQ
MVDPRSASEVDRMFPGVPLDTHDVFQYREKAYFCQDRFYWRVSSRSELNQVDQVGYVTYDILQCPEDDYKDDDDK**
MMP9 catalytic domain
(DNA)
(SEQ ID NO: 644)
atgttccaaacctttgagggcgacctcaagtggcaccaccacaacatcacctattggatccaaaactactcggaagacttg
ccgcgggcggtgattgacgacgcctttgcccgcgccttcgcactgtggagcgcggtgacgccgctcaccttcactcgcgtg
tacagccgggacgcagacatcgtcatccagtttggtgtcgcggagcacggagacgggtatcccttcgacgggaaggacggg
ctcctggcacacgcctttcctcctggccccggcattcagggagacgcccatttcgacgatgacgagttgtggtccctgggc
aagggcgtcgtggttccaactcggtttggaaacgcagatggcgcggcctgccacttccccttcatcttcgagggccgctcc
tactctgcctgcaccaccgacggtcgctccgacggcttgccctggtgcagtaccacggccaactacgacaccgacgaccgg
tttggcttctgccccagcgagagactctacacccaggacggcaatgctgatgggaaaccctgccagtttccattcatcttc
caaggccaatcctactccgcctgcaccacggacggtcgctccgacggctaccgctggtgcgccaccaccgccaactacgac
cgggacaagctcttcggcttctgcccgacccgagctgactcgacggtgatggggggcaactcggcgggggagctgtgcgtc
ttccccttcactttcctgggtaaggagtactcgacctgtaccagcgagggccgcggagatgggcgcctctggtgcgctacc
acctcgaactttgacagcgacaagaagtggggcttctgcccggaccaaggatacagtttgttcctcgtggcggcgcatgag
ttcggccacgcgctgggcttagatcattcctcagtgccggaggcgctcatgtaccctatgtaccgcttcactgaggggccc
cccttgcataaggacgacgtgaatggcatccggcacctctatggtcctcgccctgaacctgattacaaggatgacgacgat
aagtgataa
(amino acids)
(SEQ ID NO: 645)
MFQTFEGDLKWHHHNITYWIONYSEDLPRAVIDDAFARAFALWSAVTPLTFTRVYSRDADIVIQFGVAEHGDGYPFDGKD
GLLAHAFPPGPGIQGDAHFDDDELWSLGKGVVVPTRFGNADGAACHFPFIFEGRSYSACTTDGRSDGLPWCSTTANYDTD
DRFGFCPSERLYTQDGNADGKPCQFPFIFQGQSYSACTTDGRSDGYRWCATTANYDRDKLFGFCPTRADSTVMGGNSAGE
LCVFPFTFLGKEYSTCTSEGRGDGRLWCATTSNFDSDKKWGFCPDQGYSLFLVAAHEFGHALGLDHSSVPEALMYPMYRF
TEGPPLHKDDVNGIRHLYGPRPEPDYKDDDDK**
NFATc1 Promoter (NFATc1P)
(DNA)
(SEQ ID NO: 646)
aggcaggaggaagaggaaaggggcgcagggcgctcggggagcagagccgggggcccgcggtggccgcagaggccgggccgg
ggcgcagaggccgggcgagctggccgcgctctgggccgccgcctccggaactccctgcgcctggcgcgcggccaccgtgg
tcccggcaacggcattaaacagagggaaacagacccgggattccgtcacccgggcggggggataaggacggctttgagag
cagacaggaaaagggagcttttctgcatggggtgaaaaaattatttattgaaggaggaggaggcggcagcggaggaaggg
gaggggcgggaggaggaggaagagccggccgcccccgccccggccccggctcctcaggagccaagggcagcctcgccagg
tcggtcccgggctcgaggaccgcggctggggtcgaggggctcagtctcccacgtgaccggctgggcgcgccccgccagac
ccggcctcgggattccctcctcccggcgagtctccgcccgccccgtcctggaggtggggagaaggagggcggggcggggg
ggacggaaactctccccgccaaatcctggccccaggcctggggacactcgcggcgggaagatttggaggggaggggaggg
ggaggggcgtgggggcgcggcctcgctggagtccccctgaccccccgacccccgcccaccggcctgggcgtcctcccgcg
gcccctcctcccctcccggcgcccggtgctctggggcgcgtgccacgcctggctcggcgccgtaggggcccccgcaggta
gagacccctggaaatggcctcgacgccgcaggagcgaggcggccaccaccccgctaatccgggcacgtctctccaggccg
aggcctgcggtggaaaagccggggttccatttgtgctgagtcggggcggccgaatggagccaggcctcgggacgcgggac
ggacgggctctggccgcgcaccttcgcgggctctgcagcgcccgaccgcctcccccggcagggaggaggcgcttgtgggg
ggcacccacggggcacagtgatccctgggggtctgcggacctcctgggccccgcagcagacacgagtttagcctttgggt
ttagtttaaatcacataagggtgtcgtgcaatcgatttatggtttctacacaccagacactttaacctccaacccccccc
atccaagccaacaagaaaatgcggtgccgtgttggcagctgagctgcgcccgaagagacgcagggagacgtaagagagga
aagtgtgagtggccggggggcctccccccgtcagaagtcgcgcagtcgcgcccataaaacgccccctccgggcggctagg
gcaggtgagcgcgtccccgggcctccccacgccggcccctgccacagagccgtctaggtcgagcagatatttacagaata
aaaatgacaataactcgacgtcccgggacggccacgcaatctgttagtaatttagcgggatgggaatttcctttctaggg
cctgccagtgaagcgcttttccaaatttccacagcgggggaagcctgcgattttacataatgacttcagcatgccgggct
ttctcgacacccctccccggcccccggcccccgccccccgccccttttccagcagggccgggctccctccggacacccgc
gtggactcaggcgtcccgtctggcccgttcgcccccgtttcccccgccagccccagcgcccccctgcccggcccccggat
tccccgttcccgcccctacgcccccatcccctccccgtgcgcccctccccgtgcgcccccctccccgtgcgccccccctc
cccgtgcgcccccctccccgtgcgccccccctccccgggcgcccccctccccgggcgccccccctccccgtgcgcccccc
cctccccgtgcgccccccctccccgtgcgcgccccgcctcttgcgcccctgcccccaggcgagcggctgccgcggcgcgg
ggaggggcgggcgctcggcgactcgtccccggggccccgcgcgggcccgggcagcaggggcgtgatgtcacggcagggag
ggggcgcgggagccgccgggccggcggggaggcgggggaggtgttttccagctttaaaaaggcaggaggcagagcgcggc
cctgcgtcagagcgagactcagagg
NFATc1P-MMP9
(DNA)
(SEQ ID NO: 647)
aggcaggaggaagaggaaaggggcgcagggcgctcggggagcagagccgggggcccgcggtggccgcagaggccgggccgg
ggcgcagaggccgggcgagctggccgcgctctgggccgccgcctccggaactccctgcgcctggcgcgcggccaccgtgg
tcccggcaacggcattaaacagagggaaacagacccgggattccgtcacccggggcgggggataaggacggctttgagag
cagacaggaaaagggagcttttctgcatggggtgaaaaaattatttattgaaggaggaggaggcggcagcggaggaaggg
gaggggcgggaggaggaggaagagccggccgcccccgccccggccccggctcctcaggagccaagggcagcctcgccagg
tcggtcccgggctcgaggaccgcggctggggtcgaggggctcagtctcccacgtgaccggctgggcgcgccccgccagac
ccggcctcgggattccctcctcccggcgagtctccgcccgccccgtcctggaggtggggagaaggagggcggggcggggg
ggacggaaactctccccgccaaatcctggccccaggcctggggacactcgcggcgggaagatttggaggggaggggaggg
ggaggggcgtgggggcgcggcctcgctggagtccccctgaccccccgacccccgcccaccggcctgggcgtcctcccgcg
gcccctcctcccctcccggcgcccggtgctctggggcgcgtgccacgcctggctcggcgccgtaggggcccccgcaggta
gagacccctggaaatggcctcgacgccgcaggagcgaggcggccaccaccccgctaatccgggcacgtctctccaggccg
aggcctgcggtggaaaagccggggttccatttgtgctgagtcggggcggccgaatggagccaggcctcgggacgcgggac
ggacgggctctggccgcgcaccttcgcgggctctgcagcgcccgaccgcctcccccggcagggaggaggcgcttgtgggg
ggcacccacggggcacagtgatccctgggggtctgcggacctcctgggccccgcagcagacacgagtttagcctttgggt
ttagtttaaatcacataagggtgtcgtgcaatcgatttatggtttctacacaccagacactttaacctccaacccccccc
atccaagccaacaagaaaatgcggtgccgtgttggcagctgagctgcgcccgaagagacgcagggagacgtaagagagga
aagtgtgagtggccggggggcctccccccgtcagaagtcgcgcagtcgcgcccataaaacgccccctccgggcggctagg
gcaggtgagcgcgtccccgggcctccccacgccggcccctgccacagagccgtctaggtcgagcagatatttacagaata
aaaatgacaataactcgacgtcccgggacggccacgcaatctgttagtaatttagcgggatgggaatttcctttctaggg
cctgccagtgaagcgcttttccaaatttccacagcgggggaagcctgcgattttacataatgacttcagcatgccgggct
ttctcgacacccctccccggcccccggcccccgccccccgccccttttccagcagggccgggctccctccggacacccgc
gtggactcaggcgtcccgtctggcccgttcgcccccgtttcccccgccagccccagcgcccccctgcccggcccccggat
tccccgttcccgcccctacgcccccatcccctccccgtgcgcccctccccgtgcgcccccctccccgtgcgccccccctc
cccgtgcgcccccctccccgtgcgccccccctccccgggcgcccccctccccgggcgccccccctccccgtgcgcccccc
cctccccgtgcgccccccctccccgtgcgcgccccgcctcttgcgcccctgcccccaggcgagcggctgccgcggcgcgg
ggaggggcgggcgctcggcgactcgtccccggggccccgcgcgggcccgggcagcaggggcgtgatgtcacggcagggag
ggggcgcgggagccgccgggccggcggggaggcgggggaggtgttttccagctttaaaaaggcaggaggcagagcgcggc
cctgcgtcagagcgagactcagaggtctagagccaccatgagcctctggcagcccctggtcctggtgctcctggtgctgg
gctgctgctttgctgcccccagacagcgccagtccacccttgtgctcttccctggagacctgagaaccaatctcaccgaca
ggcagctggcagaggaatacctgtaccgctatggttacactcgggtggcagagatgcgtggagagtcgaaatctctggggc
ctgcgctgctgcttctccagaagcaactgtccctgcccgagaccggtgagctggatagcgccacgctgaaggccatgcgaa
ccccacggtgcggggtcccagacctgggcagattccaaacctttgagggcgacctcaagtggcaccaccacaacatcacct
attggatccaaaactactcggaagacttgccgcgggcggtgattgacgacgcctttgcccgcgccttcgcactgtggagcg
cggtgacgccgctcaccttcactcgcgtgtacagccgggacgcagacatcgtcatccagtttggtgtcgcggagcacggag
acgggtatcccttcgacgggaaggacgggctcctggcacacgcctttcctcctggccccggcattcagggagacgcccatt
tcgacgatgacgagttgtggtccctgggcaagggcgtcgtggttccaactcggtttggaaacgcagatggcgcggcctgcc
acttccccttcatcttcgagggccgctcctactctgcctgcaccaccgacggtcgctccgacggcttgccctggtgcagta
ccacggccaactacgacaccgacgaccggtttggcttctgccccagcgagagactctacacccaggacggcaatgctgatg
ggaaaccctgccagtttccattcatcttccaaggccaatcctactccgcctgcaccacggacggtcgctccgacggctacc
gctggtgcgccaccaccgccaactacgaccgggacaagctcttcggcttctgcccgacccgagctgactcgacggtgatgg
ggggcaactcggcgggggagctgtgcgtcttccccttcactttcctgggtaaggagtactcgacctgtaccagcgagggcc
gcggagatgggcgcctctggtgcgctaccacctcgaactttgacagcgacaagaagtggggcttctgcccggaccaaggat
acagtttgttcctcgtggcggcgcatgagttcggccacgcgctgggcttagatcattcctcagtgccggaggcgctcatgt
accctatgtaccgcttcactgaggggccccccttgcataaggacgacgtgaatggcatccggcacctctatggtcctcgcc
ctgaacctgagccacggcctccaaccaccaccacaccgcagcccacggctcccccgacggtctgccccaccggacccccca
ctgtccacccctcagagcgccccacagctggccccacaggtcccccctcagctggccccacaggtccccccactgctggco
cttctacggccactactgtgcctttgagtccggtggacgatgcctgcaacgtgaacatcttcgacgccatcgcggagattg
ggaaccagctgtatttgttcaaggatgggaagtactggcgattctctgagggcagggggagccggccgcagggccccttcc
ttatcgccgacaagtggcccgcgctgccccgcaagctggactcggtctttgaggagcggctctccaagaagcttttcttct
tctctgggcgccaggtgtgggtgtacacaggcgcgtcggtgctgggcccgaggcgtctggacaagctgggcctgggagccg
acgtggcccaggtgaccggggccctccggagtggcagggggaagatgctgctgttcagcgggcggcgcctctggaggttcg
acgtgaaggcgcagatggtggatccccggagcgccagcgaggtggaccggatgttccccggggtgcctttggacacgcacg
acgtcttccagtaccgagagaaagcctatttctgccaggaccgcttctactggcgcgtgagttcccggagtgagttgaacc
aggtggaccaagtgggctacgtgacctatgacatcctgcagtgccctgaggacgattacaaggatgacgacgataagtgat
aa
NFATc1P-MMP9cat
(DNA)
(SEQ ID NO: 648)
aggcaggaggaagaggaaaggggcgcagggcgctcggggagcagagccgggggcccgcggtggccgcagaggccgggccgg
ggcgcagaggccgggcgagctggccgcgctctgggccgccgcctccggaactccctgcgcctggcgcgcggccaccgtgg
tcccggcaacggcattaaacagagggaaacagacccgggattccgtcacccggcgggggggataaggacggctttgagag
cagacaggaaaagggagcttttctgcatggggtgaaaaaattatttattgaaggaggaggaggcggcagcggaggaaggg
gaggggcgggaggaggaggaagagccggccgcccccgccccggccccggctcctcaggagccaagggcagcctcgccagg
tcggtcccgggctcgaggaccgcggctggggtcgaggggctcagtctcccacgtgaccggctgggcgcgccccgccagac
ccggcctcgggattccctcctcccggcgagtctccgcccgccccgtcctggaggtggggagaaggagggcggggcggggg
ggacggaaactctccccgccaaatcctggccccaggcctggggacactcgcggcgggaagatttggaggggaggggaggg
ggaggggcgtgggggcgcggcctcgctggagtccccctgaccccccgacccccgcccaccggcctgggcgtcctcccgcg
gcccctcctcccctcccggcgcccggtgctctggggcgcgtgccacgcctggctcggcgccgtaggggcccccgcaggta
gagacccctggaaatggcctcgacgccgcaggagcgaggcggccaccaccccgctaatccgggcacgtctctccaggccg
aggcctgcggtggaaaagccggggttccatttgtgctgagtcggggcggccgaatggagccaggcctcgggacgcgggac
ggacgggctctggccgcgcaccttcgcgggctctgcagcgcccgaccgcctcccccggcagggaggaggcgcttgtgggg
ggcacccacggggcacagtgatccctgggggtctgcggacctcctgggccccgcagcagacacgagtttagcctttgggt
ttagtttaaatcacataagggtgtcgtgcaatcgatttatggtttctacacaccagacactttaacctccaacccccccc
atccaagccaacaagaaaatgcggtgccgtgttggcagctgagctgcgcccgaagagacgcagggagacgtaagagagga
aagtgtgagtggccggggggcctccccccgtcagaagtcgcgcagtcgcgcccataaaacgccccctccgggcggctagg
gcaggtgagcgcgtccccgggcctccccacgccggcccctgccacagagccgtctaggtcgagcagatatttacagaata
aaaatgacaataactcgacgtcccgggacggccacgcaatctgttagtaatttagcgggatgggaatttcctttctaggg
cctgccagtgaagcgcttttccaaatttccacagcgggggaagcctgcgattttacataatgacttcagcatgccgggct
ttctcgacacccctccccggcccccggcccccgccccccgccccttttccagcagggccgggctccctccggacacccgc
gtggactcaggcgtcccgtctggcccgttcgcccccgtttcccccgccagccccagcgcccccctgcccggcccccggat
tccccgttcccgcccctacgcccccatcccctccccgtgcgcccctccccgtgcgcccccctccccgtgcgccccccctc
cccgtgcgcccccctccccgtgcgccccccctccccgggcgcccccctccccgggcgccccccctccccgtgcgcccccc
cctccccgtgcgccccccctccccgtgcgcgccccgcctcttgcgcccctgcccccaggcgagcggctgccgcggcgcgg
ggaggggcgggcgctcggcgactcgtccccggggccccgcgcgggcccgggcagcaggggcgtgatgtcacggcagggag
ggggcgcgggagccgccgggccggcggggaggcgggggaggtgttttccagctttaaaaaggcaggaggcagagcgcggc
cctgcgtcagagcgagactcagaggtctagagccaccatgttccaaacctttgagggcgacctcaagtggcaccaccaca
acatcacctattggatccaaaactactcggaagacttgccgcgggcggtgattgacgacgcctttgcccgcgccttcgcac
tgtggagcgcggtgacgccgctcaccttcactcgcgtgtacagccgggacgcagacatcgtcatccagtttggtgtcgcgg
agcacggagacgggtatcccttcgacgggaaggacgggctcctggcacacgcctttcctcctggccccggcattcagggag
acgcccatttcgacgatgacgagttgtggtccctgggcaagggcgtcgtggttccaactcggtttggaaacgcagatggcg
cggcctgccacttccccttcatcttcgagggccgctcctactctgcctgcaccaccgacggtcgctccgacggcttgccct
ggtgcagtaccacggccaactacgacaccgacgaccggtttggcttctgccccagcgagagactctacacccaggacggca
atgctgatgggaaaccctgccagtttccattcatcttccaaggccaatcctactccgcctgcaccacggacggtcgctccg
acggctaccgctggtgcgccaccaccgccaactacgaccgggacaagctcttcggcttctgcccgacccgagctgactcga
cggtgatggggggcaactcggcgggggagctgtgcgtcttccccttcactttcctgggtaaggagtactcgacctgtacca
gcgagggccgcggagatgggcgcctctggtgcgctaccacctcgaactttgacagcgacaagaagtggggcttctgcccgg
accaaggatacagtttgttcctcgtggcggcgcatgagttcggccacgcgctgggcttagatcattcctcagtgccggagg
cgctcatgtaccctatgtaccgcttcactgaggggccccccttgcataaggacgacgtgaatggcatccggcacctctatg
gtcctcgccctgaacctgattacaaggatgacgacgataagtgataa
NFAT response element
(DNA)
(SEQ ID NO: 649)
ggaggaaaaactgtttcatacagaaggcgt
NEAT response element repeats
(DNA)
(SEQ ID NO: 650)
ggaggaaaaactgtttcatacagaaggcgtggaggaaaaactgtttcatacagaaggcgtggaggaaaaactgtttcatac
agaaggcgt
CMV minimal promoter
(DNA)
(SEQ ID NO: 651)
aggtaggcgtgtacggtgggaggtctatataagcagagctggtttagtgaaccgtcagatc
NFATREmCMV-MMP9
(DNA)
(SEQ ID NO: 652)
ggaggaaaaactgtttcatacagaaggcgtggaggaaaaactgtttcatacagaaggcgtggaggaaaaactgtttcatac
agaaggcgtagatctagactcaggtaggcgtgtacggtgggaggtctatataagcagagctggtttagtgaaccgtcagat
ctctagagccaccatgagcctctggcagcccctggtcctggtgctcctggtgctgggctgctgctttgctgcccccagaca
gcgccagtccacccttgtgctcttccctggagacctgagaaccaatctcaccgacaggcagctggcagaggaatacctgta
ccgctatggttacactcgggtggcagagatgcgtggagagtcgaaatctctggggcctgcgctgctgcttctccagaagca
actgtccctgcccgagaccggtgagctggatagcgccacgctgaaggccatgcgaaccccacggtgcggggtcccagacct
gggcagattccaaacctttgagggcgacctcaagtggcaccaccacaacatcacctattggatccaaaactactcggaaga
cttgccgcgggcggtgattgacgacgcctttgcccgcgccttcgcactgtggagcgcggtgacgccgctcaccttcactcg
cgtgtacagccgggacgcagacatcgtcatccagtttggtgtcgcggagcacggagacgggtatcccttcgacgggaagga
cgggctcctggcacacgcctttcctcctggccccggcattcagggagacgcccatttcgacgatgacgagttgtggtccct
gggcaagggcgtcgtggttccaactcggtttggaaacgcagatggcgcggcctgccacttccccttcatcttcgagggccg
ctcctactctgcctgcaccaccgacggtcgctccgacggcttgccctggtgcagtaccacggccaactacgacaccgacga
ccggtttggcttctgccccagcgagagactctacacccaggacggcaatgctgatgggaaaccctgccagtttccattcat
cttccaaggccaatcctactccgcctgcaccacggacggtcgctccgacggctaccgctggtgcgccaccaccgccaacta
cgaccgggacaagctcttcggcttctgcccgacccgagctgactcgacggtgatggggggcaactcggcgggggagctgtg
cgtcttccccttcactttcctgggtaaggagtactcgacctgtaccagcgagggccgcggagatgggcgcctctggtgcgc
taccacctcgaactttgacagcgacaagaagtggggcttctgcccggaccaaggatacagtttgttcctcgtggcggcgca
tgagttcggccacgcgctgggcttagatcattcctcagtgccggaggcgctcatgtaccctatgtaccgcttcactgaggg
gccccccttgcataaggacgacgtgaatggcatccggcacctctatggtcctcgccctgaacctgagccacggcctccaac
caccaccacaccgcagcccacggctcccccgacggtctgccccaccggaccccccactgtccacccctcagagcgccccac
agctggccccacaggtcccccctcagctggccccacaggtccccccactgctggcccttctacggccactactgtgccttt
gagtccggtggacgatgcctgcaacgtgaacatcttcgacgccatcgcggagattgggaaccagctgtatttgttcaagga
tgggaagtactggcgattctctgagggcagggggagccggccgcagggccccttccttatcgccgacaagtggcccgcgct
gccccgcaagctggactcggtctttgaggagcggctctccaagaagcttttcttcttctctgggcgccaggtgtgggtgta
cacaggcgcgtcggtgctgggcccgaggcgtctggacaagctgggcctgggagccgacgtggcccaggtgaccggggccct
ccggagtggcagggggaagatgctgctgttcagcgggcggcgcctctggaggttcgacgtgaaggcgcagatggtggatcc
ccggagcgccagcgaggtggaccggatgttccccggggtgcctttggacacgcacgacgtcttccagtaccgagagaaagc
ctatttctgccaggaccgcttctactggcgcgtgagttcccggagtgagttgaaccaggtggaccaagtgggctacgtgac
ctatgacatcctgcagtgccctgaggacgattacaaggatgacgacgataagtgataa
NFATREmCMV-MMP9cat
(DNA)
(SEQ ID NO: 653)
ggaggaaaaactgtttcatacagaaggcgtggaggaaaaactgtttcatacagaaggcgtggaggaaaaactgtttcatac
agaaggcgtagatctagactcaggtaggcgtgtacggtgggaggtctatataagcagagctggtttagtgaaccgtcagat
ctctagagccaccatgttccaaacctttgagggcgacctcaagtggcaccaccacaacatcacctattggatccaaaacta
ctcggaagacttgccgcgggcggtgattgacgacgcctttgcccgcgccttcgcactgtggagcgcggtgacgccgctcac
cttcactcgcgtgtacagccgggacgcagacatcgtcatccagtttggtgtcgcggagcacggagacgggtatcccttcga
cgggaaggacgggctcctggcacacgcctttcctcctggccccggcattcagggagacgcccatttcgacgatgacgagtt
gtggtccctgggcaagggcgtcgtggttccaactcggtttggaaacgcagatggcgcggcctgccacttccccttcatctt
cgagggccgctcctactctgcctgcaccaccgacggtcgctccgacggcttgccctggtgcagtaccacggccaactacga
caccgacgaccggtttggcttctgccccagcgagagactctacacccaggacggcaatgctgatgggaaaccctgccagtt
tccattcatcttccaaggccaatcctactccgcctgcaccacggacggtcgctccgacggctaccgctggtgcgccaccac
cgccaactacgaccgggacaagctcttcggcttctgcccgacccgagctgactcgacggtgatggggggcaactcggcggg
ggagctgtgcgtcttccccttcactttcctgggtaaggagtactcgacctgtaccagcgagggccgcggagatgggcgcct
ctggtgcgctaccacctcgaactttgacagcgacaagaagtggggcttctgcccggaccaaggatacagtttgttcctcgt
ggcggcgcatgagttcggccacgcgctgggcttagatcattcctcagtgccggaggcgctcatgtaccctatgtaccgctt
cactgaggggccccccttgcataaggacgacgtgaatggcatccggcacctctatggtcctcgccctgaacctgattacaa
ggatgacgacgataagtgataa
C2 scFv
(DNA)
(SEQ ID NO: 654)
gaggtgcagctggtggagtctgggggaggcctggtcaagcctggggggtccctgagactctcctgtgcagcctctggattc
accttcagtggctatgccatgagctgggtccgccaggctccagggaaggggctggagtgggtctcaaccattagtagtggc
ggaacctacatatactaccccgactcagtgaagggccgattcaccatctccagagacaacgccaagaactcactgtatctg
caaatgaacagcctgagagccgaggacacggccgtgtattactgtgcgagacttgggggggataattactacgaatacttc
gatgtctggggcaaagggaccacggtcaccgtctcctccggcggtggcggatccggcggtggcggatccggcggtggcgga
tccgacattgtgctgacccagtctccagcctccttggccgtgtctccaggacagagggccaccatcacctgcagagccagt
aagagtgtcagtaccagcggatactcctacatgcactggtatcagcagaaaccaggacaacctcctaaactcctgatttac
ctggcatccaatctggagagcggggtcccagccaggttcagcggcagtgggtctgggaccgatttcaccctcacaattaat
cctgtggaagctaatgatactgcaaattattactgtcagcacagtagggagctgcctttcacattcggcggagggaccaag
gtggagatcaaacgaact
(amino acids)
(SEQ ID NO: 655)
EVQLVESGGGLVKPGGSLRLSCAASGFTFSGYAMSWVRQAPGKGLEWVSTISSGGTYIYYPDSVKGRFTISRDNAKNSLY
LQMNSLRAEDTAVYYCARLGGDNYYEYFDVWGKGTTVTVSSGGGGSGGGGSGGGGSDIVLTQSPASLAVSPGQRATITCR
ASKSVSTSGYSYMHWYQQKPGQPPKLLIYLASNLESGVPARFSGSGSGTDFTLTINPVEANDTANYYCQHSRELPFTFGG
GTKVEIKRT
CD8 transmembrane domain
(DNA)
(SEQ ID NO: 656)
atctacatctgggcgcccttggccgggacttgtggggtccttctcctgtcactggttatcaccctttactgc
(amino acids)
(SEQ ID NO: 657)
IYIWAPLAGTCGVLLLSLVITLYC
4-1BB domain
(DNA)
(SEQ ID NO: 658)
aaacggggcagaaagaaactcctgtatatattcaaacaaccatttatgagaccagtacaaactactcaagaggaagatggc
tgtagctgccgatttccagaagaagaagaaggaggatgtgaactg
(amino acids)
(SEQ ID NO: 659)
KRGRKKLLYIFKQPFMRPVQTTQEEDGCSCRFPEEEEGGCEL
CD3zeta domain
(DNA)
(SEQ ID NO: 660)
agagtgaagttcagcaggagcgcagacgcccccgcgtacaagcagggccagaaccagctctataacgagctcaatctagga
cgaagagaggagtacgatgttttggacaagagacgtggccgggaccctgagatggggggaaagccgagaaggaagaaccct
caggaaggcctgtacaatgaactgcagaaagataagatggcggaggcctacagtgagattgggatgaaaggcgagcgccgg
aggggcaaggggcacgatggcctttaccagggtctcagtacagccaccaaggacacctacgacgcccttcacatgcaggcc
ctgccccctcgc
(amino acids)
(SEQ ID NO: 661)
RVKFSRSADAPAYKQGQNQLYNELNLGRREEYDVLDKRRGRDPEMGGKPRRKNPQEGLYNELQKDKMAEAYSEIGMKGER
RRGKGHDGLYQGLSTATKDTYDALHMQALPPR
Human IgG1 Fc linker
(DNA)
(SEQ ID NO: 662)
gagcccaaatcttgtgacaaaactcacacatgcccaccgtgcccagcacctgaactcctggggggaccgtcagtcttcctc
ttccccccaaaacccaaggacaccctcatgatctcccggacccctgaggtcacatgcgtggtggtggacgtgagccacgaa
gaccctgaggtcaagttcaactggtacgtggacggcgtggaggtgcataatgccaagacaaagccgcgggaggagcagtac
aacagcacgtaccgtgtggtcagcgtcctcaccgtcctgcaccaggactggctgaatggcaaggagtacaagtgcaaggtc
tccaacaaagccctcccagcccccatcgagaaaaccatctccaaagccaaagggcagccccgagaaccacaggtgtacacc
ctgcccccatcccgggaggagatgaccaagaaccaggtcagcctgacctgcctggtcaaaggcttctatcccagcgacatc
gccgtggagtgggagagcaatgggcagccggagaacaactacaagaccacgcctcccgtgctggactccgacggctccttc
ttcctctacagcaagctcaccgtggacaagagcaggtggcagcaggggaacgtcttctcatgctccgtgatgcatgaggct
ctgcacaaccactacacgcagaagagcctctccctgtctccgggtaaa
(amino acids)
(SEQ ID NO: 663)
EPKSCDKTHTCPPCPAPELLGGPSVFLFPPKPKDTLMISRTPEVTCVVVDVSHEDPEVKENWYVDGVEVHNAKTKPREEQ
YNSTYRVVSVLTVLHQDWLNGKEYKCKVSNKALPAPIEKTISKAKGQPREPQVYTLPPSREEMTKNQVSLTCLVKGFYPS
DIAVEWESNGQPENNYKTTPPVLDSDGSFFLYSKLTVDKSRWQQGNVFSCSVMHEALHNHYTQKSLSLSPGK
C2 CAR FC linker
(DNA)
(SEQ ID NO: 664)
gaggtgcagctggtggagtctgggggaggcctggtcaagcctggggggtccctgagactctcctgtgcagcctctggattc
accttcagtggctatgccatgagctgggtccgccaggctccagggaaggggctggagtgggtctcaaccattagtagtggc
ggaacctacatatactaccccgactcagtgaagggccgattcaccatctccagagacaacgccaagaactcactgtatctg
caaatgaacagcctgagagccgaggacacggccgtgtattactgtgcgagacttgggggggataattactacgaatacttc
gatgtctggggcaaagggaccacggtcaccgtctcctccggcggtggcggatccggcggtggcggatccggcggtggcgga
tccgacattgtgctgacccagtctccagcctccttggccgtgtctccaggacagagggccaccatcacctgcagagccagt
aagagtgtcagtaccagcggatactcctacatgcactggtatcagcagaaaccaggacaacctcctaaactcctgatttac
ctggcatccaatctggagagcggggtcccagccaggttcagcggcagtgggtctgggaccgatttcaccctcacaattaat
cctgtggaagctaatgatactgcaaattattactgtcagcacagtagggagctgcctttcacattcggcggagggaccaag
gtggagatcaaacgaactgagcccaaatcttgtgacaaaactcacacatgcccaccgtgcccagcacctgaactcctgggg
ggaccgtcagtcttcctcttccccccaaaacccaaggacaccctcatgatctcccggacccctgaggtcacatgcgtggtg
gtggacgtgagccacgaagaccctgaggtcaagttcaactggtacgtggacggcgtggaggtgcataatgccaagacaaag
ccgcgggaggagcagtacaacagcacgtaccgtgtggtcagcgtcctcaccgtcctgcaccaggactggctgaatggcaag
gagtacaagtgcaaggtctccaacaaagccctcccagcccccatcgagaaaaccatctccaaagccaaagggcagccccga
gaaccacaggtgtacaccctgcccccatcccgggaggagatgaccaagaaccaggtcagcctgacctgcctggtcaaaggc
ttctatcccagcgacatcgccgtggagtgggagagcaatgggcagccggagaacaactacaagaccacgcctcccgtgctg
gactccgacggctccttcttcctctacagcaagctcaccgtggacaagagcaggtggcagcaggggaacgtcttctcatgc
tccgtgatgcatgaggctctgcacaaccactacacgcagaagagcctctccctgtctccgggtaaaatctacatctgggcg
cccttggccgggacttgtggggtccttctcctgtcactggttatcaccctttactgcaaacggggcagaaagaaactcctg
tatatattcaaacaaccatttatgagaccagtacaaactactcaagaggaagatggctgtagctgccgatttccagaagaa
gaagaaggaggatgtgaactgagagtgaagttcagcaggagcgcagacgcccccgcgtacaagcagggccagaaccagctc
tataacgagctcaatctaggacgaagagaggagtacgatgttttggacaagagacgtggccgggaccctgagatgggggga
aagccgagaaggaagaaccctcaggaaggcctgtacaatgaactgcagaaagataagatggcggaggcctacagtgagatt
gggatgaaaggcgagcgccggaggggcaaggggcacgatggcctttaccagggtctcagtacagccaccaaggacacctac
gacgcccttcacatgcaggccctgccccctcgctgataa
(amino acids)
(SEQ ID NO: 665)
EVQLVESGGGLVKPGGSLRLSCAASGFTFSGYAMSWVRQAPGKGLEWVSTISSGGTYIYYPDSVKGRFTISRDNAKNSLY
LQMNSLRAEDTAVYYCARLGGDNYYEYFDVWGKGTTVTVSSGGGGSGGGGSGGGGSDIVLTQSPASLAVSPGQRATITCR
ASKSVSTSGYSYMHWYQQKPGQPPKLLIYLASNLESGVPARFSGSGSGTDFTLTINPVEANDTANYYCQHSRELPFTFGG
GTKVEIKRTEPKSCDKTHTCPPCPAPELLGGPSVFLFPPKPKDTLMISRTPEVTCVVVDVSHEDPEVKENWYVDGVEVHN
AKTKPREEQYNSTYRVVSVLTVLHQDWLNGKEYKCKVSNKALPAPIEKTISKAKGQPREPQVYTLPPSREEMTKNQVSLT
CLVKGFYPSDIAVEWESNGQPENNYKTTPPVLDSDGSFFLYSKLTVDKSRWQQGNVFSCSVMHEALHNHYTQKSLSLSPG
KIYIWAPLAGTCGVLLLSLVITLYCKRGRKKLLYIFKQPFMRPVQTTQEEDGCSCRFPEEEEGGCELRVKFSRSADAPAY
KQGQNQLYNELNLGRREEYDVLDKRRGRDPEMGGKPRRKNPQEGLYNELQKDKMAEAYSEIGMKGERRRGKGHDGLYQGL
STATKDTYDALHMQALPPR**
IgD/Fc linker
(DNA)
(SEQ ID NO: 666)
gagtctccaaaggcacaggcctcctcagtgcccactgcacaaccccaagcagagggcagcctcgccaaggcaaccacagcc
ccagccaccacccgtaacacaggaagaggcggcgaagagaagaaaaaggagaaggagaaagaggaacaagaagagagagag
acaaagacaccagagcccaaatcttgtgacaaaactcacacatgcccaccgtgcccagcacctgaactcctggggggaccg
tcagtcttcctcttccccccaaaacccaaggacaccctcatgatctcccggacccctgaggtcacatgcgtggtggtggac
gtgagccacgaagaccctgaggtcaagttcaactggtacgtggacggcgtggaggtgcataatgccaagacaaagccgcgg
gaggagcagtacaacagcacgtaccgtgtggtcagcgtcctcaccgtcctgcaccaggactggctgaatggcaaggagtac
aagtgcaaggtctccaacaaagccctcccagcccccatcgagaaaaccatctccaaagccaaagggcagccccgagaacca
caggtgtacaccctgcccccatcccgggaggagatgaccaagaaccaggtcagcctgacctgcctggtcaaaggcttctat
cccagcgacatcgccgtggagtgggagagcaatgggcagccggagaacaactacaagaccacgcctcccgtgctggactcc
gacggctccttcttcctctacagcaagctcaccgtggacaagagcaggtggcagcaggggaacgtcttctcatgctccgtg
atgcatgaggctctgcacaaccactacacgcagaagagcctctccctgtctccgggtaaa
(amino acids)
(SEQ ID NO: 667)
ESPKAQASSVPTAQPQAEGSLAKATTAPATTRNTGRGGEEKKKEKEKEEQEERETKTPEPKSCDKTHTCPPCPAPELLGG
PSVFLFPPKPKDTLMISRTPEVTCVVVDVSHEDPEVKFNWYVDGVEVHNAKTKPREEQYNSTYRVVSVLTVLHQDWLNGK
EYKCKVSNKALPAPIEKTISKAKGQPREPQVYTLPPSREEMTKNQVSLTCLVKGFYPSDIAVEWESNGQPENNYKTTPPV
LDSDGSFFLYSKLTVDKSRWQQGNVFSCSVMHEALHNHYTQKSLSLSPGK
C2 CAR IgD/FC linker
(DNA)
(SEQ ID NO: 668)
gaggtgcagctggtggagtctgggggaggcctggtcaagcctggggggtccctgagactctcctgtgcagcctctggattc
accttcagtggctatgccatgagctgggtccgccaggctccagggaaggggctggagtgggtctcaaccattagtagtggc
ggaacctacatatactaccccgactcagtgaagggccgattcaccatctccagagacaacgccaagaactcactgtatctg
caaatgaacagcctgagagccgaggacacggccgtgtattactgtgcgagacttgggggggataattactacgaatacttc
gatgtctggggcaaagggaccacggtcaccgtctcctccggcggtggcggatccggcggtggcggatccggcggtggcgga
tccgacattgtgctgacccagtctccagcctccttggccgtgtctccaggacagagggccaccatcacctgcagagccagt
aagagtgtcagtaccagcggatactcctacatgcactggtatcagcagaaaccaggacaacctcctaaactcctgatttac
ctggcatccaatctggagagcggggtcccagccaggttcagcggcagtgggtctgggaccgatttcaccctcacaattaat
cctgtggaagctaatgatactgcaaattattactgtcagcacagtagggagctgcctttcacattcggcggagggaccaag
gtggagatcaaacgaactgagtctccaaaggcacaggcctcctcagtgcccactgcacaaccccaagcagagggcagcctc
gccaaggcaaccacagccccagccaccacccgtaacacaggaagaggcggcgaagagaagaaaaaggagaaggagaaagag
gaacaagaagagagagagacaaagacaccagagcccaaatcttgtgacaaaactcacacatgcccaccgtgcccagcacct
gaactcctggggggaccgtcagtcttcctcttccccccaaaacccaaggacaccctcatgatctcccggacccctgaggtc
acatgcgtggtggtggacgtgagccacgaagaccctgaggtcaagttcaactggtacgtggacggcgtggaggtgcataat
gccaagacaaagccgcgggaggagcagtacaacagcacgtaccgtgtggtcagcgtcctcaccgtcctgcaccaggactgg
ctgaatggcaaggagtacaagtgcaaggtctccaacaaagccctcccagcccccatcgagaaaaccatctccaaagccaaa
gggcagccccgagaaccacaggtgtacaccctgcccccatcccgggaggagatgaccaagaaccaggtcagcctgacctgc
ctggtcaaaggcttctatcccagcgacatcgccgtggagtgggagagcaatgggcagccggagaacaactacaagaccacg
cctcccgtgctggactccgacggctccttcttcctctacagcaagctcaccgtggacaagagcaggtggcagcaggggaac
gtcttctcatgctccgtgatgcatgaggctctgcacaaccactacacgcagaagagcctctccctgtctccgggtaaaatc
tacatctgggcgcccttggccgggacttgtggggtccttctcctgtcactggttatcaccctttactgcaaacggggcaga
aagaaactcctgtatatattcaaacaaccatttatgagaccagtacaaactactcaagaggaagatggctgtagctgccga
tttccagaagaagaagaaggaggatgtgaactgagagtgaagttcagcaggagcgcagacgcccccgcgtacaagcagggc
cagaaccagctctataacgagctcaatctaggacgaagagaggagtacgatgttttggacaagagacgtggccgggaccct
gagatggggggaaagccgagaaggaagaaccctcaggaaggcctgtacaatgaactgcagaaagataagatggcggaggcc
tacagtgagattgggatgaaaggcgagcgccggaggggcaaggggcacgatggcctttaccagggtctcagtacagccacc
aaggacacctacgacgcccttcacatgcaggccctgccccctcgctgataa
(amino acids)
(SEQ ID NO: 669)
EVQLVESGGGLVKPGGSLRLSCAASGFTFSGYAMSWVRQAPGKGLEWVSTISSGGTYIYYPDSVKGRFTISRDNAKNSLY
LQMNSLRAEDTAVYYCARLGGDNYYEYFDVWGKGTTVTVSSGGGGSGGGGSGGGGSDIVLTQSPASLAVSPGQRATITCR
ASKSVSTSGYSYMHWYQQKPGQPPKLLIYLASNLESGVPARFSGSGSGTDFTLTINPVEANDTANYYCQHSRELPFTFGG
GTKVEIKRTESPKAQASSVPTAQPQAEGSLAKATTAPATTRNTGRGGEEKKKEKEKEEQEERETKTPEPKSCDKTHTCPP
CPAPELLGGPSVFLFPPKPKDTLMISRTPEVTCVVVDVSHEDPEVKFNWYVDGVEVHNAKTKPREEQYNSTYRVVSVLTV
LHQDWLNGKEYKCKVSNKALPAPIEKTISKAKGQPREPQVYTLPPSREEMTKNQVSLTCLVKGFYPSDIAVEWESNGQPE
NNYKTTPPVLDSDGSFFLYSKLTVDKSRWQQGNVFSCSVMHEALHNHYTQKSLSLSPGKIYIWAPLAGTCGVLLLSLVIT
LYCKRGRKKLLYIFKQPFMRPVQTTQEEDGCSCRFPEEEEGGCELRVKFSRSADAPAYKQGQNQLYNELNLGRREEYDVL
DKRRGRDPEMGGKPRRKNPQEGLYNELQKDKMAEAYSEIGMKGERRRGKGHDGLYQGLSTATKDTYDALHMQALPPR**
Fc hingeless Y407R linker
(DNA)
(SEQ ID NO: 670)
gcacctgaactcctggggggaccgtcagtcttcctcttccccccaaaacccaaggacaccctcatgatctcccggacccct
gaggtcacatgcgtggtggtggacgtgagccacgaagaccctgaggtcaagttcaactggtacgtggacggcgtggaggtg
cataatgccaagacaaagccgcgggaggagcagtacaacagcacgtaccgtgtggtcagcgtcctcaccgtcctgcaccag
gactggctgaatggcaaggagtacaagtgcaaggtctccaacaaagccctcccagcccccatcgagaaaaccatctccaaa
gccaaagggcagccccgagaaccacaggtgtacaccctgcccccatcccgggaggagatgaccaagaaccaggtcagcctg
acctgcctggtcaaaggcttctatcccagcgacatcgccgtggagtgggagagcaatgggcagccggagaacaactacaag
accacgcctcccgtgctggactccgacggctccttcttcctcaggagcaagctcaccgtggacaagagcaggtggcagcag
gggaacgtcttctcatgctccgtgatgcatgaggctctgcacaaccactacacgcagaagagcctctccctgtctccgggt
aaa
(amino acids)
(SEQ ID NO: 671)
APELLGGPSVFLFPPKPKDTLMISRTPEVTCVVVDVSHEDPEVKFNWYVDGVEVHNAKTKPREEQYNSTYRVVSVLTVLH
QDWLNGKEYKCKVSNKALPAPIEKTISKAKGQPREPQVYTLPPSREEMTKNQVSLTCLVKGFYPSDIAVEWESNGQPENN
YKTTPPVLDSDGSFFLRSKLTVDKSRWQQGNVFSCSVMHEALHNHYTQKSLSLSPGK
C2 CAR FCHingeless/Y407R linker
(DNA)
(SEQ ID NO: 672)
gaggtgcagctggtggagtctgggggaggcctggtcaagcctggggggtccctgagactctcctgtgcagcctctggattc
accttcagtggctatgccatgagctgggtccgccaggctccagggaaggggctggagtgggtctcaaccattagtagtggc
ggaacctacatatactaccccgactcagtgaagggccgattcaccatctccagagacaacgccaagaactcactgtatctg
caaatgaacagcctgagagccgaggacacggccgtgtattactgtgcgagacttgggggggataattactacgaatacttc
gatgtctggggcaaagggaccacggtcaccgtctcctccggcggtggcggatccggcggtggcggatccggcggtggcgga
tccgacattgtgctgacccagtctccagcctccttggccgtgtctccaggacagagggccaccatcacctgcagagccagt
aagagtgtcagtaccagcggatactcctacatgcactggtatcagcagaaaccaggacaacctcctaaactcctgatttac
ctggcatccaatctggagagcggggtcccagccaggttcagcggcagtgggtctgggaccgatttcaccctcacaattaat
cctgtggaagctaatgatactgcaaattattactgtcagcacagtagggagctgcctttcacattcggcggagggaccaag
gtggagatcaaacgaactgcacctgaactcctggggggaccgtcagtcttcctcttccccccaaaacccaaggacaccctc
atgatctcccggacccctgaggtcacatgcgtggtggtggacgtgagccacgaagaccctgaggtcaagttcaactggtac
gtggacggcgtggaggtgcataatgccaagacaaagccgcgggaggagcagtacaacagcacgtaccgtgtggtcagcgtc
ctcaccgtcctgcaccaggactggctgaatggcaaggagtacaagtgcaaggtctccaacaaagccctcccagcccccatc
gagaaaaccatctccaaagccaaagggcagccccgagaaccacaggtgtacaccctgcccccatcccgggaggagatgacc
aagaaccaggtcagcctgacctgcctggtcaaaggcttctatcccagcgacatcgccgtggagtgggagagcaatgggcag
ccggagaacaactacaagaccacgcctcccgtgctggactccgacggctccttcttcctcaggagcaagctcaccgtggac
aagagcaggtggcagcaggggaacgtcttctcatgctccgtgatgcatgaggctctgcacaaccactacacgcagaagagc
ctctccctgtctccgggtaaaatctacatctgggcgcccttggccgggacttgtggggtccttctcctgtcactggttatc
accctttactgcaaacggggcagaaagaaactcctgtatatattcaaacaaccatttatgagaccagtacaaactactcaa
gaggaagatggctgtagctgccgatttccagaagaagaagaaggaggatgtgaactgagagtgaagttcagcaggagcgca
gacgcccccgcgtacaagcagggccagaaccagctctataacgagctcaatctaggacgaagagaggagtacgatgttttg
gacaagagacgtggccgggaccctgagatggggggaaagccgagaaggaagaaccctcaggaaggcctgtacaatgaactg
cagaaagataagatggcggaggcctacagtgagattgggatgaaaggcgagcgccggaggggcaaggggcacgatggcctt
taccagggtctcagtacagccaccaaggacacctacgacgcccttcacatgcaggccctgccccctcgctgataa
(amino acids)
(SEQ ID NO: 673)
EVQLVESGGGLVKPGGSLRLSCAASGFTFSGYAMSWVRQAPGKGLEWVSTISSGGTYIYYPDSVKGRFTISRDNAKNSLY
LQMNSLRAEDTAVYYCARLGGDNYYEYFDVWGKGTTVTVSSGGGGSGGGGSGGGGSDIVLTQSPASLAVSPGQRATITCR
ASKSVSTSGYSYMHWYQQKPGQPPKLLIYLASNLESGVPARFSGSGSGTDFTLTINPVEANDTANYYCQHSRELPFTFGG
GTKVEIKRTAPELLGGPSVFLFPPKPKDTLMISRTPEVTCVVVDVSHEDPEVKFNWYVDGVEVHNAKTKPREEQYNSTYR
VVSVLTVLHQDWLNGKEYKCKVSNKALPAPIEKTISKAKGQPREPQVYTLPPSREEMTKNQVSLTCLVKGFYPSDIAVEW
ESNGQPENNYKTTPPVLDSDGSFFLRSKLTVDKSRWQQGNVFSCSVMHEALHNHYTQKSLSLSPGKIYIWAPLAGTCGVL
LLSLVITLYCKRGRKKLLYIFKQPFMRPVQTTQEEDGCSCRFPEEEEGGCELRVKFSRSADAPAYKQGQNQLYNELNLGR
REEYDVLDKRRGRDPEMGGKPRRKNPQEGLYNELQKDKMAEAYSEIGMKGERRRGKGHDGLYQGLSTATKDTYDALHMQA
LPPR**
IgD/FCHingeless/Y407R linker
(DNA)
(SEQ ID NO: 674)
gagtctccaaaggcacaggcctcctcagtgcccactgcacaaccccaagcagagggcagcctcgccaaggcaaccacagcc
ccagccaccacccgtaacacaggaagaggcggcgaagagaagaaaaaggagaaggagaaagaggaacaagaagagagagag
acaaagacaccagcacctgaactcctggggggaccgtcagtcttcctcttccccccaaaacccaaggacaccctcatgatc
tcccggacccctgaggtcacatgcgtggtggtggacgtgagccacgaagaccctgaggtcaagttcaactggtacgtggac
ggcgtggaggtgcataatgccaagacaaagccgcgggaggagcagtacaacagcacgtaccgtgtggtcagcgtcctcacc
gtcctgcaccaggactggctgaatggcaaggagtacaagtgcaaggtctccaacaaagccctcccagcccccatcgagaaa
accatctccaaagccaaagggcagccccgagaaccacaggtgtacaccctgcccccatcccgggaggagatgaccaagaac
caggtcagcctgacctgcctggtcaaaggcttctatcccagcgacatcgccgtggagtgggagagcaatgggcagccggag
aacaactacaagaccacgcctcccgtgctggactccgacggctccttcttcctcaggagcaagctcaccgtggacaagagc
aggtggcagcaggggaacgtcttctcatgctccgtgatgcatgaggctctgcacaaccactacacgcagaagagcctctcc
ctgtctccgggtaaa
(amino acids)
(SEQ ID NO: 675)
ESPKAQASSVPTAQPQAEGSLAKATTAPATTRNTGRGGEEKKKEKEKEEQEERETKTPAPELLGGPSVFLFPPKPKDTLM
ISRTPEVTCVVVDVSHEDPEVKFNWYVDGVEVHNAKTKPREEQYNSTYRVVSVLTVLHQDWLNGKEYKCKVSNKALPAPI
EKTISKAKGQPREPQVYTLPPSREEMTKNQVSLTCLVKGFYPSDIAVEWESNGQPENNYKTTPPVLDSDGSFFLRSKLTV
DKSRWQQGNVFSCSVMHEALHNHYTQKSLSLSPGK
C2 CAR IgD/FCHingeless/Y407R linker
(DNA)
(SEQ ID NO: 676)
gaggtgcagctggtggagtctgggggaggcctggtcaagcctggggggtccctgagactctcctgtgcagcctctggattc
accttcagtggctatgccatgagctgggtccgccaggctccagggaaggggctggagtgggtctcaaccattagtagtggc
ggaacctacatatactaccccgactcagtgaagggccgattcaccatctccagagacaacgccaagaactcactgtatctg
caaatgaacagcctgagagccgaggacacggccgtgtattactgtgcgagacttgggggggataattactacgaatacttc
gatgtctggggcaaagggaccacggtcaccgtctcctccggcggtggcggatccggcggtggcggatccggcggtggcgga
tccgacattgtgctgacccagtctccagcctccttggccgtgtctccaggacagagggccaccatcacctgcagagccagt
aagagtgtcagtaccagcggatactcctacatgcactggtatcagcagaaaccaggacaacctcctaaactcctgatttac
ctggcatccaatctggagagcggggtcccagccaggttcagcggcagtgggtctgggaccgatttcaccctcacaattaat
cctgtggaagctaatgatactgcaaattattactgtcagcacagtagggagctgcctttcacattcggcggagggaccaag
gtggagatcaaacgaactgagtctccaaaggcacaggcctcctcagtgcccactgcacaaccccaagcagagggcagcctc
gccaaggcaaccacagccccagccaccacccgtaacacaggaagaggcggcgaagagaagaaaaaggagaaggagaaagag
gaacaagaagagagagagacaaagacaccagcacctgaactcctggggggaccgtcagtcttcctcttccccccaaaaccc
aaggacaccctcatgatctcccggacccctgaggtcacatgcgtggtggtggacgtgagccacgaagaccctgaggtcaag
ttcaactggtacgtggacggcgtggaggtgcataatgccaagacaaagccgcgggaggagcagtacaacagcacgtaccgt
gtggtcagcgtcctcaccgtcctgcaccaggactggctgaatggcaaggagtacaagtgcaaggtctccaacaaagccctc
ccagcccccatcgagaaaaccatctccaaagccaaagggcagccccgagaaccacaggtgtacaccctgcccccatcccgg
gaggagatgaccaagaaccaggtcagcctgacctgcctggtcaaaggcttctatcccagcgacatcgccgtggagtgggag
agcaatgggcagccggagaacaactacaagaccacgcctcccgtgctggactccgacggctccttcttcctcaggagcaag
ctcaccgtggacaagagcaggtggcagcaggggaacgtcttctcatgctccgtgatgcatgaggctctgcacaaccactac
acgcagaagagcctctccctgtctccgggtaaaatctacatctgggcgcccttggccgggacttgtggggtccttctcctg
tcactggttatcaccctttactgcaaacggggcagaaagaaactcctgtatatattcaaacaaccatttatgagaccagta
caaactactcaagaggaagatggctgtagctgccgatttccagaagaagaagaaggaggatgtgaactgagagtgaagttc
agcaggagcgcagacgcccccgcgtacaagcagggccagaaccagctctataacgagctcaatctaggacgaagagaggag
tacgatgttttggacaagagacgtggccgggaccctgagatggggggaaagccgagaaggaagaaccctcaggaaggcctg
tacaatgaactgcagaaagataagatggcggaggcctacagtgagattgggatgaaaggcgagcgccggaggggcaagggg
cacgatggcctttaccagggtctcagtacagccaccaaggacacctacgacgcccttcacatgcaggccctgccccctcgc
tgataa
(amino acids)
(SEQ ID NO: 677)
EVQLVESGGGLVKPGGSLRLSCAASGFTFSGYAMSWVRQAPGKGLEWVSTISSGGTYIYYPDSVKGRFTISRDNAKNSLY
LQMNSLRAEDTAVYYCARLGGDNYYEYFDVWGKGTTVTVSSGGGGSGGGGSGGGGSDIVLTQSPASLAVSPGQRATITCR
ASKSVSTSGYSYMHWYQQKPGQPPKLLIYLASNLESGVPARFSGSGSGTDFTLTINPVEANDTANYYCQHSRELPFTFGG
GTKVEIKRTESPKAQASSVPTAQPQAEGSLAKATTAPATTRNTGRGGEEKKKEKEKEEQEERETKTPAPELLGGPSVFLF
PPKPKDTLMISRTPEVTCVVVDVSHEDPEVKFNWYVDGVEVHNAKTKPREEQYNSTYRVVSVLTVLHQDWLNGKEYKCKV
SNKALPAPIEKTISKAKGQPREPQVYTLPPSREEMTKNQVSLTCLVKGFYPSDIAVEWESNGQPENNYKTTPPVLDSDGS
FFLRSKLTVDKSRWQQGNVFSCSVMHEALHNHYTQKSLSLSPGKIYIWAPLAGTCGVLLLSLVITLYCKRGRKKLLYIFK
QPFMRPVQTTQEEDGCSCRFPEEEEGGCELRVKFSRSADAPAYKQGQNQLYNELNLGRREEYDVLDKRRGRDPEMGGKPR
RKNPQEGLYNELQKDKMAEAYSEIGMKGERRRGKGHDGLYQGLSTATKDTYDALHMQALPPR**
IgD linker
(DNA)
(SEQ ID NO: 678)
gagtctccaaaggcacaggcctcctcagtgcccactgcacaaccccaagcagagggcagcctcgccaaggcaaccacagcc
ccagccaccacccgtaacacaggaagaggcggcgaagagaagaaaaaggagaaggagaaagaggaacaagaagagagagag
acaaagacacca
(amino acids)
(SEQ ID NO: 679)
ESPKAQASSVPTAQPQAEGSLAKATTAPATTRNTGRGGEEKKKEKEKEEQEERETKTP
C2 CAR IgD linker
(DNA)
(SEQ ID NO: 680)
gaggtgcagctggtggagtctgggggaggcctggtcaagcctggggggtccctgagactctcctgtgcagcctctggatto
accttcagtggctatgccatgagctgggtccgccaggctccagggaaggggctggagtgggtctcaaccattagtagtggc
ggaacctacatatactaccccgactcagtgaagggccgattcaccatctccagagacaacgccaagaactcactgtatctg
caaatgaacagcctgagagccgaggacacggccgtgtattactgtgcgagacttgggggggataattactacgaatacttc
gatgtctggggcaaagggaccacggtcaccgtctcctccggcggtggcggatccggcggtggcggatccggcggtggcgga
tccgacattgtgctgacccagtctccagcctccttggccgtgtctccaggacagagggccaccatcacctgcagagccagt
aagagtgtcagtaccagcggatactcctacatgcactggtatcagcagaaaccaggacaacctcctaaactcctgatttac
ctggcatccaatctggagagcggggtcccagccaggttcagcggcagtgggtctgggaccgatttcaccctcacaattaat
cctgtggaagctaatgatactgcaaattattactgtcagcacagtagggagctgcctttcacattcggcggagggaccaag
gtggagatcaaacgaactgagtctccaaaggcacaggcctcctcagtgcccactgcacaaccccaagcagagggcagcctc
gccaaggcaaccacagccccagccaccacccgtaacacaggaagaggcggcgaagagaagaaaaaggagaaggagaaagag
gaacaagaagagagagagacaaagacaccaatctacatctgggcgcccttggccgggacttgtggggtccttctcctgtca
ctggttatcaccctttactgcaaacggggcagaaagaaactcctgtatatattcaaacaaccatttatgagaccagtacaa
actactcaagaggaagatggctgtagctgccgatttccagaagaagaagaaggaggatgtgaactgagagtgaagttcagc
aggagcgcagacgcccccgcgtacaagcagggccagaaccagctctataacgagctcaatctaggacgaagagaggagtac
gatgttttggacaagagacgtggccgggaccctgagatggggggaaagccgagaaggaagaaccctcaggaaggcctgtac
aatgaactgcagaaagataagatggcggaggcctacagtgagattgggatgaaaggcgagcgccggaggggcaaggggcac
gatggcctttaccagggtctcagtacagccaccaaggacacctacgacgcccttcacatgcaggccctgccccctcgctga
taa
(amino acids)
(SEQ ID NO: 681)
EVQLVESGGGLVKPGGSLRLSCAASGFTFSGYAMSWVRQAPGKGLEWVSTISSGGTYIYYPDSVKGRFTISRDNAKNSLY
LQMNSLRAEDTAVYYCARLGGDNYYEYFDVWGKGTTVTVSSGGGGSGGGGSGGGGSDIVLTQSPASLAVSPGQRATITCR
ASKSVSTSGYSYMHWYQQKPGQPPKLLIYLASNLESGVPARFSGSGSGTDFTLTINPVEANDTANYYCQHSRELPFTFGG
GTKVEIKRTESPKAQASSVPTAQPQAEGSLAKATTAPATTRNTGRGGEEKKKEKEKEEQEERETKTPIYIWAPLAGTCGV
LLLSLVITLYCKRGRKKLLYIFKQPFMRPVQTTQEEDGCSCRFPEEEEGGCELRVKFSRSADAPAYKQGQNQLYNELNLG
RREEYDVLDKRRGRDPEMGGKPRRKNPQEGLYNELQKDKMAEAYSEIGMKGERRRGKGHDGLYQGLSTATKDTYDALHMQ
ALPPR**
X4 linker
(DNA)
(SEQ ID NO: 682)
gacaagacgcacaccaagccacctaaaccagctccagaactgctcggaggtcctggcaccggaaccggaggacctaccatc
aaaccacctaagccacctaagcctgctcctaacctgctcggaggacct
(amino acids)
(SEQ ID NO: 683)
DKTHTKPPKPAPELLGGPGTGTGGPTIKPPKPPKPAPNLLGGP
C2 CAR X4 linker
(DNA)
(SEQ ID NO: 684)
gaggtgcagctggtggagtctgggggaggcctggtcaagcctggggggtccctgagactctcctgtgcagcctctggattc
accttcagtggctatgccatgagctgggtccgccaggctccagggaaggggctggagtgggtctcaaccattagtagtggc
ggaacctacatatactaccccgactcagtgaagggccgattcaccatctccagagacaacgccaagaactcactgtatctg
caaatgaacagcctgagagccgaggacacggccgtgtattactgtgcgagacttgggggggataattactacgaatacttc
gatgtctggggcaaagggaccacggtcaccgtctcctccggcggtggcggatccggcggtggcggatccggcggtggcgga
tccgacattgtgctgacccagtctccagcctccttggccgtgtctccaggacagagggccaccatcacctgcagagccagt
aagagtgtcagtaccagcggatactcctacatgcactggtatcagcagaaaccaggacaacctcctaaactcctgatttac
ctggcatccaatctggagagcggggtcccagccaggttcagcggcagtgggtctgggaccgatttcaccctcacaattaat
cctgtggaagctaatgatactgcaaattattactgtcagcacagtagggagctgcctttcacattcggcggagggaccaag
gtggagatcaaacgaactgacaagacgcacaccaagccacctaaaccagctccagaactgctcggaggtcctggcaccgga
accggaggacctaccatcaaaccacctaagccacctaagcctgctcctaacctgctcggaggacctatctacatctgggcg
cccttggccgggacttgtggggtccttctcctgtcactggttatcaccctttactgcaaacggggcagaaagaaactcctg
tatatattcaaacaaccatttatgagaccagtacaaactactcaagaggaagatggctgtagctgccgatttccagaagaa
gaagaaggaggatgtgaactgagagtgaagttcagcaggagcgcagacgcccccgcgtacaagcagggccagaaccagctc
tataacgagctcaatctaggacgaagagaggagtacgatgttttggacaagagacgtggccgggaccctgagatgggggga
aagccgagaaggaagaaccctcaggaaggcctgtacaatgaactgcagaaagataagatggcggaggcctacagtgagatt
gggatgaaaggcgagcgccggaggggcaaggggcacgatggcctttaccagggtctcagtacagccaccaaggacacctac
gacgcccttcacatgcaggccctgccccctcgctgataa
(amino acids)
(SEQ ID NO: 685)
EVQLVESGGGLVKPGGSLRLSCAASGFTFSGYAMSWVRQAPGKGLEWVSTISSGGTYIYYPDSVKGRFTISRDNAKNSLY
LQMNSLRAEDTAVYYCARLGGDNYYEYFDVWGKGTTVTVSSGGGGSGGGGSGGGGSDIVLTQSPASLAVSPGQRATITCR
ASKSVSTSGYSYMHWYQQKPGQPPKLLIYLASNLESGVPARFSGSGSGTDFTLTINPVEANDTANYYCQHSRELPFTFGG
GTKVEIKRTDKTHTKPPKPAPELLGGPGTGTGGPTIKPPKPPKPAPNLLGGPIYIWAPLAGTCGVLLLSLVITLYCKRGR
KKLLYIFKQPFMRPVQTTQEEDGCSCRFPEEEEGGCELRVKFSRSADAPAYKQGQNQLYNELNLGRREEYDVLDKRRGRD
PEMGGKPRRKNPQEGLYNELQKDKMAEAYSEIGMKGERRRGKGHDGLYQGLSTATKDTYDALHMQALPPR**
OKT3 scFv
(DNA)
(SEQ ID NO: 686)
caggtgcagctggtgcagagcggaggcggagtggtgcagcctggaagaagcctgcgcctgagctgcaaagcgagcggctat
acctttacccgctataccatgcattgggtgcgccaggcgccgggcaaaggcctggaatggattggctatattaacccgagc
cgcggctataccaactataaccagaaagtgaaagatcgctttaccattagcaccgataaaagcaaaagcaccgcgtttctg
cagatggatagcctgcgcccggaagataccgcggtgtattattgcgcgcgctattatgatgatcattattgcctggattat
tggggccagggcaccaccctgaccgtgagcagcggcggtggcggatccggcggtggcggatccggcggtggcggatccgat
attcagatgacccagagcccgagcagcctgagcgcgagcgtgggcgatcgcgtgaccattacctgcagcgcgagcagcagc
gtgagctatatgaactggtatcagcagaccccgggcaaagcgccgaaacgctggatttatgataccagcaaactggcgagc
ggcgtgccgagccgctttagcggcagcggcagcggcaccgattatacctttaccattagcagcctgcagccggaagatatt
gcgacctattattgccagcagtggagcagcaacccgtttacctttggccagggcaccaaactgcagattacccgctgataa
(amino acids)
(SEQ ID NO: 687)
QVQLVQSGGGVVQPGRSLRLSCKASGYTFTRYTMHWVRQAPGKGLEWIGYINPSRGYTNYNQKVKDRFTISTDKSKSTAF
LQMDSLRPEDTAVYYCARYYDDHYCLDYWGQGTTLTVSSGGGGSGGGGSGGGGSDIQMTQSPSSLSASVGDRVTITCSAS
SSVSYMNWYQQTPGKAPKRWIYDTSKLASGVPSRFSGSGSGTDYTFTISSLQPEDIATYYCQQWSSNPFTFGQGTKLQIT
R**
C2-FC-OKT3
(DNA)
(SEQ ID NO: 688)
gaggtgcagctggtggagtctgggggaggcctggtcaagcctggggggtccctgagactctcctgtgcagcctctggattc
accttcagtggctatgccatgagctgggtccgccaggctccagggaaggggctggagtgggtctcaaccattagtagtggc
ggaacctacatatactaccccgactcagtgaagggccgattcaccatctccagagacaacgccaagaactcactgtatctg
caaatgaacagcctgagagccgaggacacggccgtgtattactgtgcgagacttgggggggataattactacgaatacttc
gatgtctggggcaaagggaccacggtcaccgtctcctccggcggtggcggatccggcggtggcggatccggcggtggcgga
tccgacattgtgctgacccagtctccagcctccttggccgtgtctccaggacagagggccaccatcacctgcagagccagt
aagagtgtcagtaccagcggatactcctacatgcactggtatcagcagaaaccaggacaacctcctaaactcctgatttac
ctggcatccaatctggagagcggggtcccagccaggttcagcggcagtgggtctgggaccgatttcaccctcacaattaat
cctgtggaagctaatgatactgcaaattattactgtcagcacagtagggagctgcctttcacattcggcggagggaccaag
gtggagatcaaacgaactgagcccaaatcttgtgacaaaactcacacatgcccaccgtgcccagcacctgaactcctgggg
ggaccgtcagtcttcctcttccccccaaaacccaaggacaccctcatgatctcccggacccctgaggtcacatgcgtggtg
gtggacgtgagccacgaagaccctgaggtcaagttcaactggtacgtggacggcgtggaggtgcataatgccaagacaaag
ccgcgggaggagcagtacaacagcacgtaccgtgtggtcagcgtcctcaccgtcctgcaccaggactggctgaatggcaag
gagtacaagtgcaaggtctccaacaaagccctcccagcccccatcgagaaaaccatctccaaagccaaagggcagccccga
gaaccacaggtgtacaccctgcccccatcccgggaggagatgaccaagaaccaggtcagcctgacctgcctggtcaaaggc
ttctatcccagcgacatcgccgtggagtgggagagcaatgggcagccggagaacaactacaagaccacgcctcccgtgctg
gactccgacggctccttcttcctctacagcaagctcaccgtggacaagagcaggtggcagcaggggaacgtcttctcatgc
tccgtgatgcatgaggctctgcacaaccactacacgcagaagagcctctccctgtctccgggtaaaggcggtggcggatcc
caggtgcagctggtgcagagcggaggcggagtggtgcagcctggaagaagcctgcgcctgagctgcaaagcgagcggctat
acctttacccgctataccatgcattgggtgcgccaggcgccgggcaaaggcctggaatggattggctatattaacccgagc
cgcggctataccaactataaccagaaagtgaaagatcgctttaccattagcaccgataaaagcaaaagcaccgcgtttctg
cagatggatagcctgcgcccggaagataccgcggtgtattattgcgcgcgctattatgatgatcattattgcctggattat
tggggccagggcaccaccctgaccgtgagcagcggcggtggcggatccggcggtggcggatccggcggtggcggatccgat
attcagatgacccagagcccgagcagcctgagcgcgagcgtgggcgatcgcgtgaccattacctgcagcgcgagcagcagc
gtgagctatatgaactggtatcagcagaccccgggcaaagcgccgaaacgctggatttatgataccagcaaactggcgagc
ggcgtgccgagccgctttagcggcagcggcagcggcaccgattatacctttaccattagcagcctgcagccggaagatatt
gcgacctattattgccagcagtggagcagcaacccgtttacctttggccagggcaccaaactgcagattacccgctgataa
(amino acids)
(SEQ ID NO: 689)
EVQLVESGGGLVKPGGSLRLSCAASGFTFSGYAMSWVRQAPGKGLEWVSTISSGGTYIYYPDSVKGRFTISRDNAKNSLY
LQMNSLRAEDTAVYYCARLGGDNYYEYFDVWGKGTTVTVSSGGGGSGGGGSGGGGSDIVLTQSPASLAVSPGQRATITCR
ASKSVSTSGYSYMHWYQQKPGQPPKLLIYLASNLESGVPARFSGSGSGTDFTLTINPVEANDTANYYCQHSRELPFTFGG
GTKVEIKRTEPKSCDKTHTCPPCPAPELLGGPSVFLFPPKPKDTLMISRTPEVTCVVVDVSHEDPEVKENWYVDGVEVHN
AKTKPREEQYNSTYRVVSVLTVLHQDWLNGKEYKCKVSNKALPAPIEKTISKAKGQPREPQVYTLPPSREEMTKNQVSLT
CLVKGFYPSDIAVEWESNGQPENNYKTTPPVLDSDGSFFLYSKLTVDKSRWQQGNVFSCSVMHEALHNHYTQKSLSLSPG
KGGGGSQVQLVQSGGGVVQPGRSLRLSCKASGYTFTRYTMHWVRQAPGKGLEWIGYINPSRGYTNYNQKVKDRFTISTDK
SKSTAFLQMDSLRPEDTAVYYCARYYDDHYCLDYWGQGTTLTVSSGGGGSGGGGSGGGGSDIQMTQSPSSLSASVGDRVT
ITCSASSSVSYMNWYQQTPGKAPKRWIYDTSKLASGVPSRFSGSGSGTDYTFTISSLQPEDIATYYCQQWSSNPFTFGQG
TKLQITR**
C2-IgD/FC-OKT3
(DNA)
(SEQ ID NO: 690)
gaggtgcagctggtggagtctgggggaggcctggtcaagcctggggggtccctgagactctcctgtgcagcctctggattc
accttcagtggctatgccatgagctgggtccgccaggctccagggaaggggctggagtgggtctcaaccattagtagtggc
ggaacctacatatactaccccgactcagtgaagggccgattcaccatctccagagacaacgccaagaactcactgtatctg
caaatgaacagcctgagagccgaggacacggccgtgtattactgtgcgagacttgggggggataattactacgaatacttc
gatgtctggggcaaagggaccacggtcaccgtctcctccggcggtggcggatccggcggtggcggatccggcggtggcgga
tccgacattgtgctgacccagtctccagcctccttggccgtgtctccaggacagagggccaccatcacctgcagagccagt
aagagtgtcagtaccagcggatactcctacatgcactggtatcagcagaaaccaggacaacctcctaaactcctgatttac
ctggcatccaatctggagagcggggtcccagccaggttcagcggcagtgggtctgggaccgatttcaccctcacaattaat
cctgtggaagctaatgatactgcaaattattactgtcagcacagtagggagctgcctttcacattcggcggagggaccaag
gtggagatcaaacgaactgagtctccaaaggcacaggcctcctcagtgcccactgcacaaccccaagcagagggcagcctc
gccaaggcaaccacagccccagccaccacccgtaacacaggaagaggcggcgaagagaagaaaaaggagaaggagaaagag
gaacaagaagagagagagacaaagacaccagagcccaaatcttgtgacaaaactcacacatgcccaccgtgcccagcacct
gaactcctggggggaccgtcagtcttcctcttccccccaaaacccaaggacaccctcatgatctcccggacccctgaggtc
acatgcgtggtggtggacgtgagccacgaagaccctgaggtcaagttcaactggtacgtggacggcgtggaggtgcataat
gccaagacaaagccgcgggaggagcagtacaacagcacgtaccgtgtggtcagcgtcctcaccgtcctgcaccaggactgg
ctgaatggcaaggagtacaagtgcaaggtctccaacaaagccctcccagcccccatcgagaaaaccatctccaaagccaaa
gggcagccccgagaaccacaggtgtacaccctgcccccatcccgggaggagatgaccaagaaccaggtcagcctgacctgc
ctggtcaaaggcttctatcccagcgacatcgccgtggagtgggagagcaatgggcagccggagaacaactacaagaccacg
cctcccgtgctggactccgacggctccttcttcctctacagcaagctcaccgtggacaagagcaggtggcagcaggggaac
gtcttctcatgctccgtgatgcatgaggctctgcacaaccactacacgcagaagagcctctccctgtctccgggtaaaggc
ggtggcggatcccaggtgcagctggtgcagagcggaggcggagtggtgcagcctggaagaagcctgcgcctgagctgcaaa
gcgagcggctatacctttacccgctataccatgcattgggtgcgccaggcgccgggcaaaggcctggaatggattggctat
attaacccgagccgcggctataccaactataaccagaaagtgaaagatcgctttaccattagcaccgataaaagcaaaagc
accgcgtttctgcagatggatagcctgcgcccggaagataccgcggtgtattattgcgcgcgctattatgatgatcattat
tgcctggattattggggccagggcaccaccctgaccgtgagcagcggcggtggcggatccggcggtggcggatccggcggt
ggcggatccgatattcagatgacccagagcccgagcagcctgagcgcgagcgtgggcgatcgcgtgaccattacctgcagc
gcgagcagcagcgtgagctatatgaactggtatcagcagaccccgggcaaagcgccgaaacgctggatttatgataccagc
aaactggcgagcggcgtgccgagccgctttagcggcagcggcagcggcaccgattatacctttaccattagcagcctgcag
ccggaagatattgcgacctattattgccagcagtggagcagcaacccgtttacctttggccagggcaccaaactgcagatt
acccgctgataa
(amino acids)
(SEQ ID NO: 691)
EVQLVESGGGLVKPGGSLRLSCAASGFTFSGYAMSWVRQAPGKGLEWVSTISSGGTYIYYPDSVKGRFTISRDNAKNSLY
LQMNSLRAEDTAVYYCARLGGDNYYEYFDVWGKGTTVTVSSGGGGSGGGGSGGGGSDIVLTQSPASLAVSPGQRATITCR
ASKSVSTSGYSYMHWYQQKPGQPPKLLIYLASNLESGVPARFSGSGSGTDFTLTINPVEANDTANYYCQHSRELPFTFGG
GTKVEIKRTESPKAQASSVPTAQPQAEGSLAKATTAPATTRNTGRGGEEKKKEKEKEEQEERETKTPEPKSCDKTHTCPP
CPAPELLGGPSVFLFPPKPKDTLMISRTPEVTCVVVDVSHEDPEVKENWYVDGVEVHNAKTKPREEQYNSTYRVVSVLTV
LHQDWLNGKEYKCKVSNKALPAPIEKTISKAKGQPREPQVYTLPPSREEMTKNQVSLTCLVKGFYPSDIAVEWESNGQPE
NNYKTTPPVLDSDGSFFLYSKLTVDKSRWQQGNVFSCSVMHEALHNHYTQKSLSLSPGKGGGGSQVQLVQSGGGVVQPGR
SLRLSCKASGYTFTRYTMHWVRQAPGKGLEWIGYINPSRGYTNYNQKVKDRFTISTDKSKSTAFLQMDSLRPEDTAVYYC
ARYYDDHYCLDYWGQGTTLTVSSGGGGSGGGGSGGGGSDIQMTQSPSSLSASVGDRVTITCSASSSVSYMNWYQQTPGKA
PKRWIYDTSKLASGVPSRFSGSGSGTDYTFTISSLQPEDIATYYCQQWSSNPFTFGQGTKLQITR**
C2-FCHingeless/Y407R-OKT3
(DNA)
(SEQ ID NO: 692)
gaggtgcagctggtggagtctgggggaggcctggtcaagcctggggggtccctgagactctcctgtgcagcctctggattc
accttcagtggctatgccatgagctgggtccgccaggctccagggaaggggctggagtgggtctcaaccattagtagtggc
ggaacctacatatactaccccgactcagtgaagggccgattcaccatctccagagacaacgccaagaactcactgtatctg
caaatgaacagcctgagagccgaggacacggccgtgtattactgtgcgagacttgggggggataattactacgaatacttc
gatgtctggggcaaagggaccacggtcaccgtctcctccggcggtggcggatccggcggtggcggatccggcggtggcgga
tccgacattgtgctgacccagtctccagcctccttggccgtgtctccaggacagagggccaccatcacctgcagagccagt
aagagtgtcagtaccagcggatactcctacatgcactggtatcagcagaaaccaggacaacctcctaaactcctgatttac
ctggcatccaatctggagagcggggtcccagccaggttcagcggcagtgggtctgggaccgatttcaccctcacaattaat
cctgtggaagctaatgatactgcaaattattactgtcagcacagtagggagctgcctttcacattcggcggagggaccaag
gtggagatcaaacgaactgcacctgaactcctggggggaccgtcagtcttcctcttccccccaaaacccaaggacaccctc
atgatctcccggacccctgaggtcacatgcgtggtggtggacgtgagccacgaagaccctgaggtcaagttcaactggtac
gtggacggcgtggaggtgcataatgccaagacaaagccgcgggaggagcagtacaacagcacgtaccgtgtggtcagcgtc
ctcaccgtcctgcaccaggactggctgaatggcaaggagtacaagtgcaaggtctccaacaaagccctcccagcccccatc
gagaaaaccatctccaaagccaaagggcagccccgagaaccacaggtgtacaccctgcccccatcccgggaggagatgacc
aagaaccaggtcagcctgacctgcctggtcaaaggcttctatcccagcgacatcgccgtggagtgggagagcaatgggcag
ccggagaacaactacaagaccacgcctcccgtgctggactccgacggctccttcttcctcaggagcaagctcaccgtggac
aagagcaggtggcagcaggggaacgtcttctcatgctccgtgatgcatgaggctctgcacaaccactacacgcagaagagc
ctctccctgtctccgggtaaaggcggtggcggatcccaggtgcagctggtgcagagcggaggcggagtggtgcagcctgga
agaagcctgcgcctgagctgcaaagcgagcggctatacctttacccgctataccatgcattgggtgcgccaggcgccgggc
aaaggcctggaatggattggctatattaacccgagccgcggctataccaactataaccagaaagtgaaagatcgctttacc
attagcaccgataaaagcaaaagcaccgcgtttctgcagatggatagcctgcgcccggaagataccgcggtgtattattgc
gcgcgctattatgatgatcattattgcctggattattggggccagggcaccaccctgaccgtgagcagcggcggtggcgga
tccggcggtggcggatccggcggtggcggatccgatattcagatgacccagagcccgagcagcctgagcgcgagcgtgggc
gatcgcgtgaccattacctgcagcgcgagcagcagcgtgagctatatgaactggtatcagcagaccccgggcaaagcgccg
aaacgctggatttatgataccagcaaactggcgagcggcgtgccgagccgctttagcggcagcggcagcggcaccgattat
acctttaccattagcagcctgcagccggaagatattgcgacctattattgccagcagtggagcagcaacccgtttaccttt
ggccagggcaccaaactgcagattacccgctgataa
(amino acids)
(SEQ ID NO: 693)
EVQLVESGGGLVKPGGSLRLSCAASGFTFSGYAMSWVRQAPGKGLEWVSTISSGGTYIYYPDSVKGRFTISRDNAKNSLY
LQMNSLRAEDTAVYYCARLGGDNYYEYFDVWGKGTTVTVSSGGGGSGGGGSGGGGSDIVLTQSPASLAVSPGQRATITCR
ASKSVSTSGYSYMHWYQQKPGQPPKLLIYLASNLESGVPARFSGSGSGTDFTLTINPVEANDTANYYCQHSRELPFTFGG
GTKVEIKRTAPELLGGPSVFLFPPKPKDTLMISRTPEVTCVVVDVSHEDPEVKFNWYVDGVEVHNAKTKPREEQYNSTYR
VVSVLTVLHQDWLNGKEYKCKVSNKALPAPIEKTISKAKGQPREPQVYTLPPSREEMTKNQVSLTCLVKGFYPSDIAVEW
ESNGQPENNYKTTPPVLDSDGSFFLRSKLTVDKSRWQQGNVFSCSVMHEALHNHYTQKSLSLSPGKGGGGSQVQLVQSGG
GVVQPGRSLRLSCKASGYTFTRYTMHWVRQAPGKGLEWIGYINPSRGYTNYNQKVKDRFTISTDKSKSTAFLQMDSLRPE
DTAVYYCARYYDDHYCLDYWGQGTTLTVSSGGGGSGGGGSGGGGSDIQMTQSPSSLSASVGDRVTITCSASSSVSYMNWY
QQTPGKAPKRWIYDTSKLASGVPSRFSGSGSGTDYTFTISSLQPEDIATYYCQQWSSNPFTFGQGTKLQITR**
C2-IgD/FCHingeless/Y407R-OKT3
(DNA)
(SEQ ID NO: 694)
gaggtgcagctggtggagtctgggggaggcctggtcaagcctggggggtccctgagactctcctgtgcagcctctggattc
accttcagtggctatgccatgagctgggtccgccaggctccagggaaggggctggagtgggtctcaaccattagtagtggc
ggaacctacatatactaccccgactcagtgaagggccgattcaccatctccagagacaacgccaagaactcactgtatctg
caaatgaacagcctgagagccgaggacacggccgtgtattactgtgcgagacttgggggggataattactacgaatacttc
gatgtctggggcaaagggaccacggtcaccgtctcctccggcggtggcggatccggcggtggcggatccggcggtggcgga
tccgacattgtgctgacccagtctccagcctccttggccgtgtctccaggacagagggccaccatcacctgcagagccagt
aagagtgtcagtaccagcggatactcctacatgcactggtatcagcagaaaccaggacaacctcctaaactcctgatttac
ctggcatccaatctggagagcggggtcccagccaggttcagcggcagtgggtctgggaccgatttcaccctcacaattaat
cctgtggaagctaatgatactgcaaattattactgtcagcacagtagggagctgcctttcacattcggcggagggaccaag
gtggagatcaaacgaactgagtctccaaaggcacaggcctcctcagtgcccactgcacaaccccaagcagagggcagcctc
gccaaggcaaccacagccccagccaccacccgtaacacaggaagaggcggcgaagagaagaaaaaggagaaggagaaagag
gaacaagaagagagagagacaaagacaccagcacctgaactcctggggggaccgtcagtcttcctcttccccccaaaaccc
aaggacaccctcatgatctcccggacccctgaggtcacatgcgtggtggtggacgtgagccacgaagaccctgaggtcaag
ttcaactggtacgtggacggcgtggaggtgcataatgccaagacaaagccgcgggaggagcagtacaacagcacgtaccgt
gtggtcagcgtcctcaccgtcctgcaccaggactggctgaatggcaaggagtacaagtgcaaggtctccaacaaagccctc
ccagcccccatcgagaaaaccatctccaaagccaaagggcagccccgagaaccacaggtgtacaccctgcccccatcccgg
gaggagatgaccaagaaccaggtcagcctgacctgcctggtcaaaggcttctatcccagcgacatcgccgtggagtgggag
agcaatgggcagccggagaacaactacaagaccacgcctcccgtgctggactccgacggctccttcttcctcaggagcaag
ctcaccgtggacaagagcaggtggcagcaggggaacgtcttctcatgctccgtgatgcatgaggctctgcacaaccactac
acgcagaagagcctctccctgtctccgggtaaaggcggtggcggatcccaggtgcagctggtgcagagcggaggcggagtg
gtgcagcctggaagaagcctgcgcctgagctgcaaagcgagcggctatacctttacccgctataccatgcattgggtgcgc
caggcgccgggcaaaggcctggaatggattggctatattaacccgagccgcggctataccaactataaccagaaagtgaaa
gatcgctttaccattagcaccgataaaagcaaaagcaccgcgtttctgcagatggatagcctgcgcccggaagataccgcg
gtgtattattgcgcgcgctattatgatgatcattattgcctggattattggggccagggcaccaccctgaccgtgagcagc
ggcggtggcggatccggcggtggcggatccggcggtggcggatccgatattcagatgacccagagcccgagcagcctgagc
gcgagcgtgggcgatcgcgtgaccattacctgcagcgcgagcagcagcgtgagctatatgaactggtatcagcagaccccg
ggcaaagcgccgaaacgctggatttatgataccagcaaactggcgagcggcgtgccgagccgctttagcggcagcggcagc
ggcaccgattatacctttaccattagcagcctgcagccggaagatattgcgacctattattgccagcagtggagcagcaac
ccgtttacctttggccagggcaccaaactgcagattacccgctgataa
(amino acids)
(SEQ ID NO: 695)
EVQLVESGGGLVKPGGSLRLSCAASGFTFSGYAMSWVRQAPGKGLEWVSTISSGGTYIYYPDSVKGRFTISRDNAKNSLYL
QMNSLRAEDTAVYYCARLGGDNYYEYFDVWGKGTTVTVSSGGGGSGGGGSGGGGSDIVLTQSPASLAVSPGQRATITCRAS
KSVSTSGYSYMHWYQQKPGQPPKLLIYLASNLESGVPARFSGSGSGTDFTLTINPVEANDTANYYCQHSRELPFTFGGGTK
VEIKRTESPKAQASSVPTAQPQAEGSLAKATTAPATTRNTGRGGEEKKKEKEKEEQEERETKTPAPELLGGPSVFLFPPKP
KDTLMISRTPEVTCVVVDVSHEDPEVKFNWYVDGVEVHNAKTKPREEQYNSTYRVVSVLTVLHQDWLNGKEYKCKVSNKAL
PAPIEKTISKAKGQPREPQVYTLPPSREEMTKNQVSLTCLVKGFYPSDIAVEWESNGQPENNYKTTPPVLDSDGSFFLRSK
LTVDKSRWQQGNVFSCSVMHEALHNHYTQKSLSLSPGKGGGGSQVQLVQSGGGVVQPGRSLRLSCKASGYTFTRYTMHWVR
QAPGKGLEWIGYINPSRGYTNYNQKVKDRFTISTDKSKSTAFLQMDSLRPEDTAVYYCARYYDDHYCLDYWGQGTTLTVSS
GGGGSGGGGSGGGGSDIQMTQSPSSLSASVGDRVTITCSASSSVSYMNWYQQTPGKAPKRWIYDTSKLASGVPSRFSGSGS
GTDYTFTISSLQPEDIATYYCQQWSSNPFTFGQGTKLQITR**
C2-IgD-OKT3
(DNA)
(SEQ ID NO: 696)
gaggtgcagctggtggagtctgggggaggcctggtcaagcctggggggtccctgagactctcctgtgcagcctctggattc
accttcagtggctatgccatgagctgggtccgccaggctccagggaaggggctggagtgggtctcaaccattagtagtggc
ggaacctacatatactaccccgactcagtgaagggccgattcaccatctccagagacaacgccaagaactcactgtatctg
caaatgaacagcctgagagccgaggacacggccgtgtattactgtgcgagacttgggggggataattactacgaatacttc
gatgtctggggcaaagggaccacggtcaccgtctcctccggcggtggcggatccggcggtggcggatccggcggtggcgga
tccgacattgtgctgacccagtctccagcctccttggccgtgtctccaggacagagggccaccatcacctgcagagccagt
aagagtgtcagtaccagcggatactcctacatgcactggtatcagcagaaaccaggacaacctcctaaactcctgatttac
ctggcatccaatctggagagcggggtcccagccaggttcagcggcagtgggtctgggaccgatttcaccctcacaattaat
cctgtggaagctaatgatactgcaaattattactgtcagcacagtagggagctgcctttcacattcggcggagggaccaag
gtggagatcaaacgaactgagtctccaaaggcacaggcctcctcagtgcccactgcacaaccccaagcagagggcagcctc
gccaaggcaaccacagccccagccaccacccgtaacacaggaagaggcggcgaagagaagaaaaaggagaaggagaaagag
gaacaagaagagagagagacaaagacaccaggcggtggcggatcccaggtgcagctggtgcagagcggaggcggagtggtg
cagcctggaagaagcctgcgcctgagctgcaaagcgagcggctatacctttacccgctataccatgcattgggtgcgccag
gcgccgggcaaaggcctggaatggattggctatattaacccgagccgcggctataccaactataaccagaaagtgaaagat
cgctttaccattagcaccgataaaagcaaaagcaccgcgtttctgcagatggatagcctgcgcccggaagataccgcggtg
tattattgcgcgcgctattatgatgatcattattgcctggattattggggccagggcaccaccctgaccgtgagcagcggc
ggtggcggatccggcggtggcggatccggcggtggcggatccgatattcagatgacccagagcccgagcagcctgagcgcg
agcgtgggcgatcgcgtgaccattacctgcagcgcgagcagcagcgtgagctatatgaactggtatcagcagaccccgggc
aaagcgccgaaacgctggatttatgataccagcaaactggcgagcggcgtgccgagccgctttagcggcagcggcagcggc
accgattatacctttaccattagcagcctgcagccggaagatattgcgacctattattgccagcagtggagcagcaacccg
tttacctttggccagggcaccaaactgcagattacccgctgataa
(amino acids)
(SEQ ID NO: 697)
EVQLVESGGGLVKPGGSLRLSCAASGFTFSGYAMSWVRQAPGKGLEWVSTISSGGTYIYYPDSVKGRFTISRDNAKNSLY
LQMNSLRAEDTAVYYCARLGGDNYYEYFDVWGKGTTVTVSSGGGGSGGGGSGGGGSDIVLTQSPASLAVSPGQRATITCR
ASKSVSTSGYSYMHWYQQKPGQPPKLLIYLASNLESGVPARFSGSGSGTDFTLTINPVEANDTANYYCQHSRELPFTFGG
GTKVEIKRTESPKAQASSVPTAQPQAEGSLAKATTAPATTRNTGRGGEEKKKEKEKEEQEERETKTPGGGGSQVQLVQSG
GGVVQPGRSLRLSCKASGYTFTRYTMHWVRQAPGKGLEWIGYINPSRGYTNYNQKVKDRFTISTDKSKSTAFLQMDSLRP
EDTAVYYCARYYDDHYCLDYWGQGTTLTVSSGGGGSGGGGSGGGGSDIQMTQSPSSLSASVGDRVTITCSASSSVSYMNW
YQQTPGKAPKRWIYDTSKLASGVPSRFSGSGSGTDYTFTISSLQPEDIATYYCQQWSSNPFTFGQGTKLQITR**
C2-x4-OKT3
(DNA)
(SEQ ID NO: 698)
gaggtgcagctggtggagtctgggggaggcctggtcaagcctggggggtccctgagactctcctgtgcagcctctggattc
accttcagtggctatgccatgagctgggtccgccaggctccagggaaggggctggagtgggtctcaaccattagtagtggc
ggaacctacatatactaccccgactcagtgaagggccgattcaccatctccagagacaacgccaagaactcactgtatctg
caaatgaacagcctgagagccgaggacacggccgtgtattactgtgcgagacttgggggggataattactacgaatacttc
gatgtctggggcaaagggaccacggtcaccgtctcctccggcggtggcggatccggcggtggcggatccggcggtggcgga
tccgacattgtgctgacccagtctccagcctccttggccgtgtctccaggacagagggccaccatcacctgcagagccagt
aagagtgtcagtaccagcggatactcctacatgcactggtatcagcagaaaccaggacaacctcctaaactcctgatttac
ctggcatccaatctggagagcggggtcccagccaggttcagcggcagtgggtctgggaccgatttcaccctcacaattaat
cctgtggaagctaatgatactgcaaattattactgtcagcacagtagggagctgcctttcacattcggcggagggaccaag
gtggagatcaaacgaactgacaagacgcacaccaagccacctaaaccagctccagaactgctcggaggtcctggcaccgga
accggaggacctaccatcaaaccacctaagccacctaagcctgctcctaacctgctcggaggacctggcggtggcggatcc
caggtgcagctggtgcagagcggaggcggagtggtgcagcctggaagaagcctgcgcctgagctgcaaagcgagcggctat
acctttacccgctataccatgcattgggtgcgccaggcgccgggcaaaggcctggaatggattggctatattaacccgagc
cgcggctataccaactataaccagaaagtgaaagatcgctttaccattagcaccgataaaagcaaaagcaccgcgtttctg
cagatggatagcctgcgcccggaagataccgcggtgtattattgcgcgcgctattatgatgatcattattgcctggattat
tggggccagggcaccaccctgaccgtgagcagcggcggtggcggatccggcggtggcggatccggcggtggcggatccgat
attcagatgacccagagcccgagcagcctgagcgcgagcgtgggcgatcgcgtgaccattacctgcagcgcgagcagcagc
gtgagctatatgaactggtatcagcagaccccgggcaaagcgccgaaacgctggatttatgataccagcaaactggcgagc
ggcgtgccgagccgctttagcggcagcggcagcggcaccgattatacctttaccattagcagcctgcagccggaagatatt
gcgacctattattgccagcagtggagcagcaacccgtttacctttggccagggcaccaaactgcagattacccgctgataa
(amino acids)
(SEQ ID NO: 699)
EVQLVESGGGLVKPGGSLRLSCAASGFTFSGYAMSWVRQAPGKGLEWVSTISSGGTYIYYPDSVKGRFTISRDNAKNSLY
LQMNSLRAEDTAVYYCARLGGDNYYEYFDVWGKGTTVTVSSGGGGSGGGGSGGGGSDIVLTQSPASLAVSPGQRATITCR
ASKSVSTSGYSYMHWYQQKPGQPPKLLIYLASNLESGVPARFSGSGSGTDFTLTINPVEANDTANYYCQHSRELPFTFGG
GTKVEIKRTDKTHTKPPKPAPELLGGPGTGTGGPTIKPPKPPKPAPNLLGGPGGGGSQVQLVQSGGGVVQPGRSLRLSCK
ASGYTFTRYTMHWVRQAPGKGLEWIGYINPSRGYTNYNQKVKDRFTISTDKSKSTAFLQMDSLRPEDTAVYYCARYYDDH
YCLDYWGQGTTLTVSSGGGGSGGGGSGGGGSDIQMTQSPSSLSASVGDRVTITCSASSSVSYMNWYQQTPGKAPKRWIYD
TSKLASGVPSRFSGSGSGTDYTFTISSLQPEDIATYYCQQWSSNPFTFGQGTKLQITR**
C2-MMP9
(DNA)
(SEQ ID NO: 700)
gaggtgcagctggtggagtctgggggaggcctggtcaagcctggggggtccctgagactctcctgtgcagcctctggattc
accttcagtggctatgccatgagctgggtccgccaggctccagggaaggggctggagtgggtctcaaccattagtagtggc
ggaacctacatatactaccccgactcagtgaagggccgattcaccatctccagagacaacgccaagaactcactgtatctg
caaatgaacagcctgagagccgaggacacggccgtgtattactgtgcgagacttgggggggataattactacgaatacttc
gatgtctggggcaaagggaccacggtcaccgtctcctccggcggtggcggatccggcggtggcggatccggcggtggcgga
tccgacattgtgctgacccagtctccagcctccttggccgtgtctccaggacagagggccaccatcacctgcagagccagt
aagagtgtcagtaccagcggatactcctacatgcactggtatcagcagaaaccaggacaacctcctaaactcctgatttac
ctggcatccaatctggagagcggggtcccagccaggttcagcggcagtgggtctgggaccgatttcaccctcacaattaat
cctgtggaagctaatgatactgcaaattattactgtcagcacagtagggagctgcctttcacattcggcggagggaccaag
gtggagatcaaacgaactggcggtggcggatccagcctctggcagcccctggtcctggtgctcctggtgctgggctgctgc
tttgctgcccccagacagcgccagtccacccttgtgctcttccctggagacctgagaaccaatctcaccgacaggcagctg
gcagaggaatacctgtaccgctatggttacactcgggtggcagagatgcgtggagagtcgaaatctctggggcctgcgctg
ctgcttctccagaagcaactgtccctgcccgagaccggtgagctggatagcgccacgctgaaggccatgcgaaccccacgg
tgcggggtcccagacctgggcagattccaaacctttgagggcgacctcaagtggcaccaccacaacatcacctattggatc
caaaactactcggaagacttgccgcgggcggtgattgacgacgcctttgcccgcgccttcgcactgtggagcgcggtgacg
ccgctcaccttcactcgcgtgtacagccgggacgcagacatcgtcatccagtttggtgtcgcggagcacggagacgggtat
cccttcgacgggaaggacgggctcctggcacacgcctttcctcctggccccggcattcagggagacgcccatttcgacgat
gacgagttgtggtccctgggcaagggcgtcgtggttccaactcggtttggaaacgcagatggcgcggcctgccacttcccc
ttcatcttcgagggccgctcctactctgcctgcaccaccgacggtcgctccgacggcttgccctggtgcagtaccacggcc
aactacgacaccgacgaccggtttggcttctgccccagcgagagactctacacccaggacggcaatgctgatgggaaaccc
tgccagtttccattcatcttccaaggccaatcctactccgcctgcaccacggacggtcgctccgacggctaccgctggtgc
gccaccaccgccaactacgaccgggacaagctcttcggcttctgcccgacccgagctgactcgacggtgatggggggcaac
tcggcgggggagctgtgcgtcttccccttcactttcctgggtaaggagtactcgacctgtaccagcgagggccgcggagat
gggcgcctctggtgcgctaccacctcgaactttgacagcgacaagaagtggggcttctgcccggaccaaggatacagtttg
ttcctcgtggcggcgcatgagttcggccacgcgctgggcttagatcattcctcagtgccggaggcgctcatgtaccctatg
taccgcttcactgaggggccccccttgcataaggacgacgtgaatggcatccggcacctctatggtcctcgccctgaacct
gagccacggcctccaaccaccaccacaccgcagcccacggctcccccgacggtctgccccaccggaccccccactgtccac
ccctcagagcgccccacagctggccccacaggtcccccctcagctggccccacaggtccccccactgctggcccttctacg
gccactactgtgcctttgagtccggtggacgatgcctgcaacgtgaacatcttcgacgccatcgcggagattgggaaccag
ctgtatttgttcaaggatgggaagtactggcgattctctgagggcagggggagccggccgcagggccccttccttatcgcc
gacaagtggcccgcgctgccccgcaagctggactcggtctttgaggagcggctctccaagaagcttttcttcttctctggg
cgccaggtgtgggtgtacacaggcgcgtcggtgctgggcccgaggcgtctggacaagctgggcctgggagccgacgtggcc
caggtgaccggggccctccggagtggcagggggaagatgctgctgttcagcgggcggcgcctctggaggttcgacgtgaag
gcgcagatggtggatccccggagcgccagcgaggtggaccggatgttccccggggtgcctttggacacgcacgacgtcttc
cagtaccgagagaaagcctatttctgccaggaccgcttctactggcgcgtgagttcccggagtgagttgaaccaggtggac
caagtgggctacgtgacctatgacatcctgcagtgccctgaggacgattacaaggatgacgacgataagtgataa
(amino acids)
(SEQ ID NO: 701)
EVQLVESGGGLVKPGGSLRLSCAASGFTFSGYAMSWVRQAPGKGLEWVSTISSGGTYIYYPDSVKGRFTISRDNAKNSLY
LQMNSLRAEDTAVYYCARLGGDNYYEYFDVWGKGTTVTVSSGGGGSGGGGSGGGGSDIVLTQSPASLAVSPGQRATITCR
ASKSVSTSGYSYMHWYQQKPGQPPKLLIYLASNLESGVPARFSGSGSGTDFTLTINPVEANDTANYYCQHSRELPFTFGG
GTKVEIKRTGGGGSSLWQPLVLVLLVLGCCFAAPRQRQSTLVLFPGDLRTNLTDRQLAEEYLYRYGYTRVAEMRGESKSL
GPALLLLQKQLSLPETGELDSATLKAMRTPRCGVPDLGRFQTFEGDLKWHHHNITYWIQNYSEDLPRAVIDDAFARAFAL
WSAVTPLTFTRVYSRDADIVIQFGVAEHGDGYPFDGKDGLLAHAFPPGPGIQGDAHFDDDELWSLGKGVVVPTREGNADG
AACHFPFIFEGRSYSACTTDGRSDGLPWCSTTANYDTDDRFGFCPSERLYTQDGNADGKPCQFPFIFQGQSYSACTTDGR
SDGYRWCATTANYDRDKLFGFCPTRADSTVMGGNSAGELCVFPFTFLGKEYSTCTSEGRGDGRLWCATTSNEDSDKKWGF
CPDQGYSLFLVAAHEFGHALGLDHSSVPEALMYPMYRFTEGPPLHKDDVNGIRHLYGPRPEPEPRPPTTTTPQPTAPPTV
CPTGPPTVHPSERPTAGPTGPPSAGPTGPPTAGPSTATTVPLSPVDDACNVNIFDAIAEIGNQLYLFKDGKYWRFSEGRG
SRPQGPFLIADKWPALPRKLDSVFEERLSKKLFFFSGRQVWVYTGASVLGPRRLDKLGLGADVAQVTGALRSGRGKMLLF
SGRRLWRFDVKAQMVDPRSASEVDRMFPGVPLDTHDVFQYREKAYFCQDRFYWRVSSRSELNQVDQVGYVTYDILQCPED
DYKDDDDK**
C2-MMP9cat
(DNA)
(SEQ ID NO: 702)
gaggtgcagctggtggagtctgggggaggcctggtcaagcctggggggtccctgagactctcctgtgcagcctctggattc
accttcagtggctatgccatgagctgggtccgccaggctccagggaaggggctggagtgggtctcaaccattagtagtggc
ggaacctacatatactaccccgactcagtgaagggccgattcaccatctccagagacaacgccaagaactcactgtatctg
caaatgaacagcctgagagccgaggacacggccgtgtattactgtgcgagacttgggggggataattactacgaatacttc
gatgtctggggcaaagggaccacggtcaccgtctcctccggcggtggcggatccggcggtggcggatccggcggtggcgga
tccgacattgtgctgacccagtctccagcctccttggccgtgtctccaggacagagggccaccatcacctgcagagccagt
aagagtgtcagtaccagcggatactcctacatgcactggtatcagcagaaaccaggacaacctcctaaactcctgatttac
ctggcatccaatctggagagcggggtcccagccaggttcagcggcagtgggtctgggaccgatttcaccctcacaattaat
cctgtggaagctaatgatactgcaaattattactgtcagcacagtagggagctgcctttcacattcggcggagggaccaag
gtggagatcaaacgaactggcggtggcggatccttccaaacctttgagggcgacctcaagtggcaccaccacaacatcacc
tattggatccaaaactactcggaagacttgccgcgggcggtgattgacgacgcctttgcccgcgccttcgcactgtggagc
gcggtgacgccgctcaccttcactcgcgtgtacagccgggacgcagacatcgtcatccagtttggtgtcgcggagcacgga
gacgggtatcccttcgacgggaaggacgggctcctggcacacgcctttcctcctggccccggcattcagggagacgcccat
ttcgacgatgacgagttgtggtccctgggcaagggcgtcgtggttccaactcggtttggaaacgcagatggcgcggcctgc
cacttccccttcatcttcgagggccgctcctactctgcctgcaccaccgacggtcgctccgacggcttgccctggtgcagt
accacggccaactacgacaccgacgaccggtttggcttctgccccagcgagagactctacacccaggacggcaatgctgat
gggaaaccctgccagtttccattcatcttccaaggccaatcctactccgcctgcaccacggacggtcgctccgacggctac
cgctggtgcgccaccaccgccaactacgaccgggacaagctcttcggcttctgcccgacccgagctgactcgacggtgatg
gggggcaactcggcgggggagctgtgcgtcttccccttcactttcctgggtaaggagtactcgacctgtaccagcgagggc
cgcggagatgggcgcctctggtgcgctaccacctcgaactttgacagcgacaagaagtggggcttctgcccggaccaagga
tacagtttgttcctcgtggcggcgcatgagttcggccacgcgctgggcttagatcattcctcagtgccggaggcgctcatg
taccctatgtaccgcttcactgaggggccccccttgcataaggacgacgtgaatggcatccggcacctctatggtcctcgc
cctgaacctgattacaaggatgacgacgataagtgataa
(amino acids)
(SEQ ID NO: 703)
EVQLVESGGGLVKPGGSLRLSCAASGFTFSGYAMSWVRQAPGKGLEWVSTISSGGTYIYYPDSVKGRFTISRDNAKNSLY
LQMNSLRAEDTAVYYCARLGGDNYYEYFDVWGKGTTVTVSSGGGGSGGGGSGGGGSDIVLTQSPASLAVSPGQRATITCR
ASKSVSTSGYSYMHWYQQKPGQPPKLLIYLASNLESGVPARFSGSGSGTDFTLTINPVEANDTANYYCQHSRELPFTFGG
GTKVEIKRTGGGGSFQTFEGDLKWHHHNITYWIQNYSEDLPRAVIDDAFARAFALWSAVTPLTFTRVYSRDADIVIQFGV
AEHGDGYPFDGKDGLLAHAFPPGPGIQGDAHFDDDELWSLGKGVVVPTRFGNADGAACHFPFIFEGRSYSACTTDGRSDG
LPWCSTTANYDTDDRFGFCPSERLYTQDGNADGKPCQFPFIFQGQSYSACTTDGRSDGYRWCATTANYDRDKLFGFCPTR
ADSTVMGGNSAGELCVFPFTFLGKEYSTCTSEGRGDGRLWCATTSNFDSDKKWGFCPDQGYSLFLVAAHEFGHALGLDHS
SVPEALMYPMYRFTEGPPLHKDDVNGIRHLYGPRPEPDYK
DDDDK**
for
scFvs and between C2 and MMP9 include but
Other linkers for BiTES between two scFvs and between C2 and MMP9 include but
are not limited to those shown as SEQ ID NOS: 705, 707, 709, 711, 713, 715
and 717.
[G₄S₁]x2 linker sequence:
(DNA)
(SEQ ID NO: 704)
ggcggtggcggatccggcggtggcggatcc
(amino acids)
(SEQ ID NO: 705)
GGGGSGGGGS
[G₄S₁]x3 linker sequence:
(DNA)
(SEQ ID NO: 706)
ggcggtggcggatccggcggtggcggatccggcggtggcggatcc
(amino acids)
(SEQ ID NO: 707)
GGGGSGGGGSGGGGS
Long GS linker sequence:
(DNA)
(SEQ ID NO: 708)
ggcggtggaagcggcggtggcggatccggcagcggcggaagcggcggtggcggatccggcggtgga
(amino acids)
(SEQ ID NO: 709)
GGGSGGGGSGSGGSGGGGSGGG
13 aa GS linker sequence:
(DNA)
(SEQ ID NO: 710)
ggcggtggatccggcggtggcggatccggcggtggatcc
(amino acids)
(SEQ ID NO: 711)
GGGSGGGGSGGGS
8 aa GS linker sequence:
(DNA)
(SEQ ID NO: 712)
ggcggttccggcggtggatccgga
(amino acids)
(SEQ ID NO: 713)
GGSGGGSG
12 aa GS linker sequence:
(DNA)
(SEQ ID NO: 714)
ggcggttccggcggtggatccggcggtggcggatccgga
(amino acids)
(SEQ ID NO: 715)
GGSGGGSGGGSG
24 aa GS linker sequence:
(DNA)
(SEQ ID NO: 716)
ggcggttccggcggtggatccggcggtggcggatccggaggcggttccggcggtggatccggcggtggcggatccgga
(amino acids)
(SEQ ID NO: 717)
GGSGGGSGGGSGGGSGGGSGGGSG
CAR-T C2 CD8/CD8/4-1BB/CD3z #44
N-CD81s-huMNC2scFv-CD8ecd fragment-CD8 transmembrane-4-1BB-CD3zeta-C
(DNA)
(SEQ ID NO: 718)
atggccttaccagtgaccgccttgctcctgccgctggccttgctgctccacgccgccaggccggaggtgcagctggtgga
gtctgggggaggcctggtcaagcctggggggtccctgagactctcctgtgcagcctctggattcaccttcagtggctatg
ccatgagctgggtccgccaggctccagggaaggggctggagtgggtctcaaccattagtagtggcggaacctacatatac
taccccgactcagtgaagggccgattcaccatctccagagacaacgccaagaactcactgtatctgcaaatgaacagcct
gagagccgaggacacggccgtgtattactgtgcgagacttgggggggataattactacgaatacttcgatgtctggggca
aagggaccacggtcaccgtctcctccggcggtggcggatccggcggtggcggatccggcggtggcggatccgacattgtg
ctgacccagtctccagcctccttggccgtgtctccaggacagagggccaccatcacctgcagagccagtaagagtgtcag
taccagcggatactcctacatgcactggtatcagcagaaaccaggacaacctcctaaactcctgatttacctggcatcca
atctggagagcggggtcccagccaggttcagcggcagtgggtctgggaccgatttcaccctcacaattaatcctgtggaa
gctaatgatactgcaaattattactgtcagcacagtagggagctgcctttcacattcggcggagggaccaaggtggagat
caaacgaactacaacaacccctgcccccagacctcctaccccagcccctacaattgccagccagcctctgagcctgaggc
ccgaggcttgtagacctgctgctggcggagccgtgcacaccagaggactggatttcgcctgcgacatctacatctgggcg
cccttggccgggacttgtggggtccttctcctgtcactggttatcaccctttactgcaaacggggcagaaagaaactcct
gtatatattcaaacaaccatttatgagaccagtacaaactactcaagaggaagatggctgtagctgccgatttccagaag
aagaagaaggaggatgtgaactgagagtgaagttcagcaggagcgcagacgcccccgcgtacaagcagggccagaaccag
ctctataacgagctcaatctaggacgaagagaggagtacgatgttttggacaagagacgtggccgggaccctgagatggg
gggaaagccgagaaggaagaaccctcaggaaggcctgtacaatgaactgcagaaagataagatggcggaggcctacagtg
agattgggatgaaaggcgagcgccggaggggcaaggggcacgatggcctttaccagggtctcagtacagccaccaaggac
acctacgacgcccttcacatgcaggccctgccccctcgctgataa
(amino acids)
(SEQ ID NO: 719)
MALPVTALLLPLALLLHAARPEVQLVESGGGLVKPGGSLRLSCAASGFTFSGYAMSWVRQAPGKGLEWVSTISSGGTYIY
YPDSVKGRFTISRDNAKNSLYLQMNSLRAEDTAVYYCARLGGDNYYEYFDVWGKGTTVTVSSGGGGSGGGGSGGGGSDIV
LTQSPASLAVSPGQRATITCRASKSVSTSGYSYMHWYQQKPGQPPKLLIYLASNLESGVPARFSGSGSGTDFTLTINPVE
ANDTANYYCQHSRELPFTFGGGTKVEIKRTTTTPAPRPPTPAPTIASQPLSLRPEACRPAAGGAVHTRGLDFACDIYIWA
PLAGTCGVLLLSLVITLYCKRGRKKLLYIFKQPFMRPVQTTQEEDGCSCRFPEEEEGGCELRVKFSRSADAPAYKQGQNQ
LYNELNLGRREEYDVLDKRRGRDPEMGGKPRRKNPQEGLYNELQKDKMAEAYSEIGMKGERRRGKGHDGLYQGLSTATKD
TYDALHMQALPPR**
CAR-T IgK C2 CD8/CD8/4-1BB/CD3z #45
N-IgKls-huMNC2scFv-CD8ecd fragment-CD8 transmembrane-4-1BB-CD3zeta-C
(DNA)
(SEQ ID NO: 720)
atggagacagacacactcctgctatgggtactgctgctctgggttccaggttccactggtgaggtgcagctggtggagtc
tgggggaggcctggtcaagcctggggggtccctgagactctcctgtgcagcctctggattcaccttcagtggctatgcca
tgagctgggtccgccaggctccagggaaggggctggagtgggtctcaaccattagtagtggcggaacctacatatactac
cccgactcagtgaagggccgattcaccatctccagagacaacgccaagaactcactgtatctgcaaatgaacagcctgag
agccgaggacacggccgtgtattactgtgcgagacttgggggggataattactacgaatacttcgatgtctggggcaaag
ggaccacggtcaccgtctcctccggcggtggcggatccggcggtggcggatccggcggtggcggatccgacattgtgctg
acccagtctccagcctccttggccgtgtctccaggacagagggccaccatcacctgcagagccagtaagagtgtcagtac
cagcggatactcctacatgcactggtatcagcagaaaccaggacaacctcctaaactcctgatttacctggcatccaatc
tggagagcggggtcccagccaggttcagcggcagtgggtctgggaccgatttcaccctcacaattaatcctgtggaagct
aatgatactgcaaattattactgtcagcacagtagggagctgcctttcacattcggcggagggaccaaggtggagatcaa
acgaactacaacaacccctgcccccagacctcctaccccagcccctacaattgccagccagcctctgagcctgaggcccg
aggcttgtagacctgctgctggcggagccgtgcacaccagaggactggatttcgcctgcgacatctacatctgggcgccc
ttggccgggacttgtggggtccttctcctgtcactggttatcaccctttactgcaaacggggcagaaagaaactcctgta
tatattcaaacaaccatttatgagaccagtacaaactactcaagaggaagatggctgtagctgccgatttccagaagaag
aagaaggaggatgtgaactgagagtgaagttcagcaggagcgcagacgcccccgcgtacaagcagggccagaaccagctc
tataacgagctcaatctaggacgaagagaggagtacgatgttttggacaagagacgtggccgggaccctgagatgggggg
aaagccgagaaggaagaaccctcaggaaggcctgtacaatgaactgcagaaagataagatggcggaggcctacagtgaga
ttgggatgaaaggcgagcgccggaggggcaaggggcacgatggcctttaccagggtctcagtacagccaccaaggacacc
tacgacgcccttcacatgcaggccctgccccctcgctgataa
(amino acids)
(SEQ ID NO: 721)
METDTLLLWVLLLWVPGSTGEVQLVESGGGLVKPGGSLRLSCAASGFTFSGYAMSWVRQAPGKGLEWVSTISSGGTYIYY
PDSVKGRFTISRDNAKNSLYLQMNSLRAEDTAVYYCARLGGDNYYEYFDVWGKGTTVTVSSGGGGSGGGGSGGGGSDIVL
TQSPASLAVSPGQRATITCRASKSVSTSGYSYMHWYQQKPGQPPKLLIYLASNLESGVPARFSGSGSGTDFTLTINPVEA
NDTANYYCQHSRELPFTFGGGTKVEIKRTTTTPAPRPPTPAPTIASQPLSLRPEACRPAAGGAVHTRGLDFACDIYIWAP
LAGTCGVLLLSLVITLYCKRGRKKLLYIFKQPFMRPVQTTQEEDGCSCRFPEEEEGGCELRVKFSRSADAPAYKQGQNQL
YNELNLGRREEYDVLDKRRGRDPEMGGKPRRKNPQEGLYNELQKDKMAEAYSEIGMKGERRRGKGHDGLYQGLSTATKDT
YDALHMQALPPR**
CAR-T C2 op CD8/CD8/4-1BB/CD3z #46
N-CD81s-huMNC2scFv codon optimized-CD8ecd fragment-CD8 transmembrane-4-1BB-
CD3zeta-C
(DNA)
(SEQ ID NO: 722)
atggccttaccagtgaccgccttgctcctgccgctggccttgctgctccacgccgccaggccggaagtgcagctggtgga
atctggcggcggactcgtgaagcctggcggctctctgagactgagctgtgccgccagcggcttcacctttagcggctacg
ccatgagctgggtgcgccaggctcctggcaaaggcctggaatgggtgtccaccatctctagcggcggcacctacatctac
taccccgacagcgtgaagggccggttcaccatcagccgggacaacgccaagaacagcctgtacctgcagatgaactccct
gcgggccgaggacaccgccgtgtactattgtgctagactgggcggcgacaactactacgagtacttcgacgtgtggggca
agggcaccaccgtgacagtgtctagcggaggcggaggatcaggcggcggaggaagtggcggagggggatctgatatcgtg
ctgacccagagccctgccagcctggctgtgtctcctggacagagggccaccatcacctgtcgggccagcaagagcgtgtc
cacctccggctacagctacatgcactggtatcagcagaagcccggccagccccccaagctgctgatctacctggccagca
acctggaaagcggcgtgcccgctagattttccggctctggcagcggcaccgacttcaccctgaccatcaaccccgtggaa
gccaacgacaccgccaattactactgccagcacagcagagagctgcccttcaccttcggcggaggcaccaaggtggaaat
caagcggaccacaacaacccctgcccccagacctcctaccccagcccctacaattgccagccagcctctgagcctgaggc
ccgaggcttgtagacctgctgctggcggagccgtgcacaccagaggactggatttcgcctgcgacatctacatctgggcg
cccttggccgggacttgtggggtccttctcctgtcactggttatcaccctttactgcaaacggggcagaaagaaactcct
gtatatattcaaacaaccatttatgagaccagtacaaactactcaagaggaagatggctgtagctgccgatttccagaag
aagaagaaggaggatgtgaactgagagtgaagttcagcaggagcgcagacgcccccgcgtacaagcagggccagaaccag
ctctataacgagctcaatctaggacgaagagaggagtacgatgttttggacaagagacgtggccgggaccctgagatggg
gggaaagccgagaaggaagaaccctcaggaaggcctgtacaatgaactgcagaaagataagatggcggaggcctacagtg
agattgggatgaaaggcgagcgccggaggggcaaggggcacgatggcctttaccagggtctcagtacagccaccaaggac
acctacgacgcccttcacatgcaggccctgccccctcgctgataa
(amino acids)
(SEQ ID NO: 723)
MALPVTALLLPLALLLHAARPEVQLVESGGGLVKPGGSLRLSCAASGFTFSGYAMSWVRQAPGKGLEWVSTISSGGTYIY
YPDSVKGRFTISRDNAKNSLYLQMNSLRAEDTAVYYCARLGGDNYYEYFDVWGKGTTVTVSSGGGGSGGGGSGGGGSDIV
LTQSPASLAVSPGQRATITCRASKSVSTSGYSYMHWYQQKPGQPPKLLIYLASNLESGVPARFSGSGSGTDFTLTINPVE
ANDTANYYCQHSRELPFTFGGGTKVEIKRTTTTPAPRPPTPAPTIASQPLSLRPEACRPAAGGAVHTRGLDFACDIYIWA
PLAGTCGVLLLSLVITLYCKRGRKKLLYIFKQPFMRPVQTTQEEDGCSCRFPEEEEGGCELRVKFSRSADAPAYKQGQNQ
LYNELNLGRREEYDVLDKRRGRDPEMGGKPRRKNPQEGLYNELQKDKMAEAYSEIGMKGERRRGKGHDGLYQGLSTATKD
TYDALHMQALPPR**
CAR-T IgK C2 op CD8/CD8/4-1BB/CD3z #47
N-IgKls-huMNC2scFv codon optimized-CD8ecd fragment-CD8 transmembrane-4-1BB-
CD3zeta-C
(DNA)
(SEQ ID NO: 724)
atggagacagacacactcctgctatgggtactgctgctctgggttccaggttccactggtgaagtgcagctggtggaatc
tggcggcggactcgtgaagcctggcggctctctgagactgagctgtgccgccagcggcttcacctttagcggctacgcca
tgagctgggtgcgccaggctcctggcaaaggcctggaatgggtgtccaccatctctagcggcggcacctacatctactac
cccgacagcgtgaagggccggttcaccatcagccgggacaacgccaagaacagcctgtacctgcagatgaactccctgcg
ggccgaggacaccgccgtgtactattgtgctagactgggcggcgacaactactacgagtacttcgacgtgtggggcaagg
gcaccaccgtgacagtgtctagcggaggcggaggatcaggcggcggaggaagtggcggagggggatctgatatcgtgctg
acccagagccctgccagcctggctgtgtctcctggacagagggccaccatcacctgtcgggccagcaagagcgtgtccac
ctccggctacagctacatgcactggtatcagcagaagcccggccagccccccaagctgctgatctacctggccagcaacc
tggaaagcggcgtgcccgctagattttccggctctggcagcggcaccgacttcaccctgaccatcaaccccgtggaagcc
aacgacaccgccaattactactgccagcacagcagagagctgcccttcaccttcggcggaggcaccaaggtggaaatcaa
gcggaccacaacaacccctgcccccagacctcctaccccagcccctacaattgccagccagcctctgagcctgaggcccg
aggcttgtagacctgctgctggcggagccgtgcacaccagaggactggatttcgcctgcgacatctacatctgggcgccc
ttggccgggacttgtggggtccttctcctgtcactggttatcaccctttactgcaaacggggcagaaagaaactcctgta
tatattcaaacaaccatttatgagaccagtacaaactactcaagaggaagatggctgtagctgccgatttccagaagaag
aagaaggaggatgtgaactgagagtgaagttcagcaggagcgcagacgcccccgcgtacaagcagggccagaaccagctc
tataacgagctcaatctaggacgaagagaggagtacgatgttttggacaagagacgtggccgggaccctgagatgggggg
aaagccgagaaggaagaaccctcaggaaggcctgtacaatgaactgcagaaagataagatggcggaggcctacagtgaga
ttgggatgaaaggcgagcgccggaggggcaaggggcacgatggcctttaccagggtctcagtacagccaccaaggacacc
tacgacgcccttcacatgcaggccctgccccctcgctgataa
(amino acids)
(SEQ ID NO: 725)
METDTLLLWVLLLWVPGSTGEVQLVESGGGLVKPGGSLRLSCAASGFTFSGYAMSWVRQAPGKGLEWVSTISSGGTYIYY
PDSVKGRFTISRDNAKNSLYLQMNSLRAEDTAVYYCARLGGDNYYEYFDVWGKGTTVTVSSGGGGSGGGGSGGGGSDIVL
TQSPASLAVSPGQRATITCRASKSVSTSGYSYMHWYQQKPGQPPKLLIYLASNLESGVPARFSGSGSGTDFTLTINPVEA
NDTANYYCQHSRELPFTFGGGTKVEIKRTTTTPAPRPPTPAPTIASQPLSLRPEACRPAAGGAVHTRGLDFACDIYIWAP
LAGTCGVLLLSLVITLYCKRGRKKLLYIFKQPFMRPVQTTQEEDGCSCRFPEEEEGGCELRVKFSRSADAPAYKQGQNQL
YNELNLGRREEYDVLDKRRGRDPEMGGKPRRKNPQEGLYNELQKDKMAEAYSEIGMKGERRRGKGHDGLYQGLSTATKDT
YDALHMQALPPR**
CAR-T C2 CD8/CD8/4-1BB/CD3z op #48
N-CD8ls-huMNC2scFv-CD8ecd fragment-CD8 transmembrane-4-1BB-CD3zeta (all
domains codon optimized)-C
(DNA)
(SEQ ID NO: 726)
atggccttaccagtgaccgccttgctcctgccgctggccttgctgctccacgccgccaggccggaagtgcagctggtgga
atctggcggcggactcgtgaagcctggcggctctctgagactgagctgtgccgccagcggcttcacctttagcggctacg
ccatgagctgggtgcgccaggctcctggcaaaggcctggaatgggtgtccaccatctctagcggcggcacctacatctac
taccccgacagcgtgaagggccggttcaccatcagccgggacaacgccaagaacagcctgtacctgcagatgaactccct
gcgggccgaggacaccgccgtgtactattgtgctagactgggcggcgacaactactacgagtacttcgacgtgtggggca
agggcaccaccgtgacagtgtctagcggaggcggaggatcaggcggcggaggaagtggcggagggggatctgatatcgtg
ctgacccagagccctgccagcctggctgtgtctcctggacagagggccaccatcacctgtcgggccagcaagagcgtgtc
cacctccggctacagctacatgcactggtatcagcagaagcccggccagccccccaagctgctgatctacctggccagca
acctggaaagcggcgtgcccgctagattttccggctctggcagcggcaccgacttcaccctgaccatcaaccccgtggaa
gccaacgacaccgccaattactactgccagcacagcagagagctgcccttcaccttcggcggaggcaccaaggtggaaat
caagcggaccacaacaacccctgcccccagacctcctaccccagcccctacaattgccagccagcctctgagcctgaggc
ccgaggcttgtagacctgctgctggcggagccgtgcacaccagaggactggatttcgcctgcgacatctacatctgggcc
cctctggccggcacatgtggcgtgctgctgctgagcctcgtgatcaccctgtactgcaagcggggcagaaagaagctgct
gtacatcttcaagcagcccttcatgcggcccgtgcagaccacccaggaagaggacggctgctcctgcagattccccgagg
aagaagaaggcggctgcgagctgagagtgaagttcagcagatccgccgacgcccctgcctacaagcagggccagaaccag
ctgtacaacgagctgaacctgggcagacgggaagagtacgacgtgctggacaagcggagaggcagggaccctgagatggg
cggcaagcccagaagaaagaacccccaggaaggcctgtataacgaactgcagaaagacaagatggccgaggcctacagcg
agatcggaatgaagggcgagcggagaagaggcaagggccacgatggcctgtaccagggcctgagcaccgccaccaaggac
acctatgacgccctgcacatgcaggccctgcctcccagatgataa
(amino acids)
(SEQ ID NO: 727)
MALPVTALLLPLALLLHAARPEVQLVESGGGLVKPGGSLRLSCAASGFTFSGYAMSWVRQAPGKGLEWVSTISSGGTYIY
YPDSVKGRFTISRDNAKNSLYLQMNSLRAEDTAVYYCARLGGDNYYEYFDVWGKGTTVTVSSGGGGSGGGGSGGGGSDIV
LTQSPASLAVSPGQRATITCRASKSVSTSGYSYMHWYQQKPGQPPKLLIYLASNLESGVPARFSGSGSGTDFTLTINPVE
ANDTANYYCQHSRELPFTFGGGTKVEIKRTTTTPAPRPPTPAPTIASQPLSLRPEACRPAAGGAVHTRGLDFACDIYIWA
PLAGTCGVLLLSLVITLYCKRGRKKLLYIFKQPFMRPVQTTQEEDGCSCRFPEEEEGGCELRVKFSRSADAPAYKQGQNQ
LYNELNLGRREEYDVLDKRRGRDPEMGGKPRRKNPQEGLYNELQKDKMAEAYSEIGMKGERRRGKGHDGLYQGLSTATKD
TYDALHMQALPPR**
CAR-T IgK C2 CD8/CD8/4-1BB/CD3z op #49
N-IgKls-huMNC2scFv-CD8ecd fragment-CD8 transmembrane-4-1BB-CD3zeta (all
domains codon optimized)-C
(DNA)
(SEQ ID NO: 728)
atggagacagacacactcctgctatgggtactgctgctctgggttccaggttccactggtgaagtgcagctggtggaatc
tggcggcggactcgtgaagcctggcggctctctgagactgagctgtgccgccagcggcttcacctttagcggctacgcca
tgagctgggtgcgccaggctcctggcaaaggcctggaatgggtgtccaccatctctagcggcggcacctacatctactac
cccgacagcgtgaagggccggttcaccatcagccgggacaacgccaagaacagcctgtacctgcagatgaactccctgcg
ggccgaggacaccgccgtgtactattgtgctagactgggcggcgacaactactacgagtacttcgacgtgtggggcaagg
gcaccaccgtgacagtgtctagcggaggcggaggatcaggcggcggaggaagtggcggagggggatctgatatcgtgctg
acccagagccctgccagcctggctgtgtctcctggacagagggccaccatcacctgtcgggccagcaagagcgtgtccac
ctccggctacagctacatgcactggtatcagcagaagcccggccagccccccaagctgctgatctacctggccagcaacc
tggaaagcggcgtgcccgctagattttccggctctggcagcggcaccgacttcaccctgaccatcaaccccgtggaagcc
aacgacaccgccaattactactgccagcacagcagagagctgcccttcaccttcggcggaggcaccaaggtggaaatcaa
gcggaccacaacaacccctgcccccagacctcctaccccagcccctacaattgccagccagcctctgagcctgaggcccg
aggcttgtagacctgctgctggcggagccgtgcacaccagaggactggatttcgcctgcgacatctacatctgggcccct
ctggccggcacatgtggcgtgctgctgctgagcctcgtgatcaccctgtactgcaagcggggcagaaagaagctgctgta
catcttcaagcagcccttcatgcggcccgtgcagaccacccaggaagaggacggctgctcctgcagattccccgaggaag
aagaaggcggctgcgagctgagagtgaagttcagcagatccgccgacgcccctgcctacaagcagggccagaaccagctg
tacaacgagctgaacctgggcagacgggaagagtacgacgtgctggacaagcggagaggcagggaccctgagatgggcgg
caagcccagaagaaagaacccccaggaaggcctgtataacgaactgcagaaagacaagatggccgaggcctacagcgaga
tcggaatgaagggcgagcggagaagaggcaagggccacgatggcctgtaccagggcctgagcaccgccaccaaggacacc
tatgacgccctgcacatgcaggccctgcctcccagatgataa
(amino acids)
(SEQ ID NO: 729)
METDTLLLWVLLLWVPGSTGEVQLVESGGGLVKPGGSLRLSCAASGFTFSGYAMSWVRQAPGKGLEWVSTISSGGTYIYY
PDSVKGRFTISRDNAKNSLYLQMNSLRAEDTAVYYCARLGGDNYYEYFDVWGKGTTVTVSSGGGGSGGGGSGGGGSDIVL
TQSPASLAVSPGQRATITCRASKSVSTSGYSYMHWYQQKPGQPPKLLIYLASNLESGVPARFSGSGSGTDFTLTINPVEA
NDTANYYCQHSRELPFTFGGGTKVEIKRTTTTPAPRPPTPAPTIASQPLSLRPEACRPAAGGAVHTRGLDFACDIYIWAP
LAGTCGVLLLSLVITLYCKRGRKKLLYIFKQPFMRPVQTTQEEDGCSCRFPEEEEGGCELRVKFSRSADAPAYKQGQNQL
YNELNLGRREEYDVLDKRRGRDPEMGGKPRRKNPQEGLYNELQKDKMAEAYSEIGMKGERRRGKGHDGLYQGLSTATKDT
YDALHMQALPPR**
CAR-T C2 CD4/CD4/4-1BB/CD3z #50
N-CD8ls-huMNC2scFv-CD4ecd fragment-CD4 transmembrane-4-1BB-CD3zeta-C
(DNA)
(SEQ ID NO: 730)
atggccttaccagtgaccgccttgctcctgccgctggccttgctgctccacgccgccaggccggaggtgcagctggtgga
gtctgggggaggcctggtcaagcctggggggtccctgagactctcctgtgcagcctctggattcaccttcagtggctatg
ccatgagctgggtccgccaggctccagggaaggggctggagtgggtctcaaccattagtagtggcggaacctacatatac
taccccgactcagtgaagggccgattcaccatctccagagacaacgccaagaactcactgtatctgcaaatgaacagcct
gagagccgaggacacggccgtgtattactgtgcgagacttgggggggataattactacgaatacttcgatgtctggggca
aagggaccacggtcaccgtctcctccggcggtggcggatccggcggtggcggatccggcggtggcggatccgacattgtg
ctgacccagtctccagcctccttggccgtgtctccaggacagagggccaccatcacctgcagagccagtaagagtgtcag
taccagcggatactcctacatgcactggtatcagcagaaaccaggacaacctcctaaactcctgatttacctggcatcca
atctggagagcggggtcccagccaggttcagcggcagtgggtctgggaccgatttcaccctcacaattaatcctgtggaa
gctaatgatactgcaaattattactgtcagcacagtagggagctgcctttcacattcggcggagggaccaaggtggagat
caaacgaacttcgggacaggtcctgctggaatccaacatcaaggttctgcccacatggtccaccccggtgcagccaatgg
ccctgattgtgctggggggcgtcgccggcctcctgcttttcattgggctaggcatcttcttcaaacggggcagaaagaaa
ctcctgtatatattcaaacaaccatttatgagaccagtacaaactactcaagaggaagatggctgtagctgccgatttcc
agaagaagaagaaggaggatgtgaactgagagtgaagttcagcaggagcgcagacgcccccgcgtacaagcagggccaga
accagctctataacgagctcaatctaggacgaagagaggagtacgatgttttggacaagagacgtggccgggaccctgag
atggggggaaagccgagaaggaagaaccctcaggaaggcctgtacaatgaactgcagaaagataagatggcggaggccta
cagtgagattgggatgaaaggcgagcgccggaggggcaaggggcacgatggcctttaccagggtctcagtacagccacca
aggacacctacgacgcccttcacatgcaggccctgccccctcgctgataa
(amino acids)
(SEQ ID NO: 731)
MALPVTALLLPLALLLHAARPEVQLVESGGGLVKPGGSLRLSCAASGFTFSGYAMSWVRQAPGKGLEWVSTISSGGTYIY
YPDSVKGRFTISRDNAKNSLYLQMNSLRAEDTAVYYCARLGGDNYYEYFDVWGKGTTVTVSSGGGGSGGGGSGGGGSDIV
LTQSPASLAVSPGQRATITCRASKSVSTSGYSYMHWYQQKPGQPPKLLIYLASNLESGVPARFSGSGSGTDFTLTINPVE
ANDTANYYCQHSRELPFTFGGGTKVEIKRTSGQVLLESNIKVLPTWSTPVQPMALIVLGGVAGLLLFIGLGIFFKRGRKK
LLYIFKQPFMRPVQTTQEEDGCSCRFPEEEEGGCELRVKFSRSADAPAYKQGQNQLYNELNLGRREEYDVLDKRRGRDPE
MGGKPRRKNPQEGLYNELQKDKMAEAYSEIGMKGERRRGKGHDGLYQGLSTATKDTYDALHMQALPPR**
CAR-T C2 FC/CD8/4-1BB/CD3z “Fc” CAR53
N-CD8ls-huMNC2scFv-Human IgG1 Fc-CD8 transmembrane-4-1BB-CD3zeta-C
(DNA)
(SEQ ID NO: 732)
atggccttaccagtgaccgccttgctcctgccgctggccttgctgctccacgccgccaggccggaggtgcagctggtgga
gtctgggggaggcctggtcaagcctggggggtccctgagactctcctgtgcagcctctggattcaccttcagtggctatg
ccatgagctgggtccgccaggctccagggaaggggctggagtgggtctcaaccattagtagtggcggaacctacatatac
taccccgactcagtgaagggccgattcaccatctccagagacaacgccaagaactcactgtatctgcaaatgaacagcct
gagagccgaggacacggccgtgtattactgtgcgagacttgggggggataattactacgaatacttcgatgtctggggca
aagggaccacggtcaccgtctcctccggcggtggcggatccggcggtggcggatccggcggtggcggatccgacattgtg
ctgacccagtctccagcctccttggccgtgtctccaggacagagggccaccatcacctgcagagccagtaagagtgtcag
taccagcggatactcctacatgcactggtatcagcagaaaccaggacaacctcctaaactcctgatttacctggcatcca
atctggagagcggggtcccagccaggttcagcggcagtgggtctgggaccgatttcaccctcacaattaatcctgtggaa
gctaatgatactgcaaattattactgtcagcacagtagggagctgcctttcacattcggcggagggaccaaggtggagat
caaacgaactgagcccaaatcttgtgacaaaactcacacatgcccaccgtgcccagcacctgaactcctggggggaccgt
cagtcttcctcttccccccaaaacccaaggacaccctcatgatctcccggacccctgaggtcacatgcgtggtggtggac
gtgagccacgaagaccctgaggtcaagttcaactggtacgtggacggcgtggaggtgcataatgccaagacaaagccgcg
ggaggagcagtacaacagcacgtaccgtgtggtcagcgtcctcaccgtcctgcaccaggactggctgaatggcaaggagt
acaagtgcaaggtctccaacaaagccctcccagcccccatcgagaaaaccatctccaaagccaaagggcagccccgagaa
ccacaggtgtacaccctgcccccatcccgggaggagatgaccaagaaccaggtcagcctgacctgcctggtcaaaggctt
ctatcccagcgacatcgccgtggagtgggagagcaatgggcagccggagaacaactacaagaccacgcctcccgtgctgg
actccgacggctccttcttcctctacagcaagctcaccgtggacaagagcaggtggcagcaggggaacgtcttctcatgc
tccgtgatgcatgaggctctgcacaaccactacacgcagaagagcctctccctgtctccgggtaaaatctacatctgggc
gcccttggccgggacttgtggggtccttctcctgtcactggttatcaccctttactgcaaacggggcagaaagaaactcc
tgtatatattcaaacaaccatttatgagaccagtacaaactactcaagaggaagatggctgtagctgccgatttccagaa
gaagaagaaggaggatgtgaactgagagtgaagttcagcaggagcgcagacgcccccgcgtacaagcagggccagaacca
gctctataacgagctcaatctaggacgaagagaggagtacgatgttttggacaagagacgtggccgggaccctgagatgg
ggggaaagccgagaaggaagaaccctcaggaaggcctgtacaatgaactgcagaaagataagatggcggaggcctacagt
gagattgggatgaaaggcgagcgccggaggggcaaggggcacgatggcctttaccagggtctcagtacagccaccaagga
cacctacgacgcccttcacatgcaggccctgccccctcgctgataa
(amino acids)
(SEQ ID NO: 733)
MALPVTALLLPLALLLHAARPEVQLVESGGGLVKPGGSLRLSCAASGFTFSGYAMSWVRQAPGKGLEWVSTISSGGTYIY
YPDSVKGRFTISRDNAKNSLYLQMNSLRAEDTAVYYCARLGGDNYYEYFDVWGKGTTVTVSSGGGGSGGGGSGGGGSDIV
LTQSPASLAVSPGQRATITCRASKSVSTSGYSYMHWYQQKPGQPPKLLIYLASNLESGVPARFSGSGSGTDFTLTINPVE
ANDTANYYCQHSRELPFTFGGGTKVEIKRTEPKSCDKTHTCPPCPAPELLGGPSVFLFPPKPKDTLMISRTPEVTCVVVD
VSHEDPEVKFNWYVDGVEVHNAKTKPREEQYNSTYRVVSVLTVLHQDWLNGKEYKCKVSNKALPAPIEKTISKAKGQPRE
PQVYTLPPSREEMTKNQVSLTCLVKGFYPSDIAVEWESNGQPENNYKTTPPVLDSDGSFFLYSKLTVDKSRWQQGNVFSC
SVMHEALHNHYTQKSLSLSPGKIYIWAPLAGTCGVLLLSLVITLYCKRGRKKLLYIFKQPFMRPVQTTQEEDGCSCRFPE
EEEGGCELRVKFSRSADAPAYKQGQNQLYNELNLGRREEYDVLDKRRGRDPEMGGKPRRKNPQEGLYNELQKDKMAEAYS
EIGMKGERRRGKGHDGLYQGLSTATKDTYDALHMQALPPR**
CAR-T C2 IgD/FC/CD8/4-1BB/CD3z “IgD-Fc” CAR54
N-CD8ls-huMNC2scFv-IgD hinge-Human IgG1 Fc-CD8 transmembrane-4-1BB-CD3zeta-
C
(DNA)
(SEQ ID NO: 734)
atggccttaccagtgaccgccttgctcctgccgctggccttgctgctccacgccgccaggccggaggtgcagctggtgga
gtctgggggaggcctggtcaagcctggggggtccctgagactctcctgtgcagcctctggattcaccttcagtggctatg
ccatgagctgggtccgccaggctccagggaaggggctggagtgggtctcaaccattagtagtggcggaacctacatatac
taccccgactcagtgaagggccgattcaccatctccagagacaacgccaagaactcactgtatctgcaaatgaacagcct
gagagccgaggacacggccgtgtattactgtgcgagacttgggggggataattactacgaatacttcgatgtctggggca
aagggaccacggtcaccgtctcctccggcggtggcggatccggcggtggcggatccggcggtggcggatccgacattgtg
ctgacccagtctccagcctccttggccgtgtctccaggacagagggccaccatcacctgcagagccagtaagagtgtcag
taccagcggatactcctacatgcactggtatcagcagaaaccaggacaacctcctaaactcctgatttacctggcatcca
atctggagagcggggtcccagccaggttcagcggcagtgggtctgggaccgatttcaccctcacaattaatcctgtggaa
gctaatgatactgcaaattattactgtcagcacagtagggagctgcctttcacattcggcggagggaccaaggtggagat
caaacgaactgagtctccaaaggcacaggcctcctcagtgcccactgcacaaccccaagcagagggcagcctcgccaagg
caaccacagccccagccaccacccgtaacacaggaagaggcggcgaagagaagaaaaaggagaaggagaaagaggaacaa
gaagagagagagacaaagacaccagagcccaaatcttgtgacaaaactcacacatgcccaccgtgcccagcacctgaact
cctggggggaccgtcagtcttcctcttccccccaaaacccaaggacaccctcatgatctcccggacccctgaggtcacat
gcgtggtggtggacgtgagccacgaagaccctgaggtcaagttcaactggtacgtggacggcgtggaggtgcataatgcc
aagacaaagccgcgggaggagcagtacaacagcacgtaccgtgtggtcagcgtcctcaccgtcctgcaccaggactggct
gaatggcaaggagtacaagtgcaaggtctccaacaaagccctcccagcccccatcgagaaaaccatctccaaagccaaag
ggcagccccgagaaccacaggtgtacaccctgcccccatcccgggaggagatgaccaagaaccaggtcagcctgacctgc
ctggtcaaaggcttctatcccagcgacatcgccgtggagtgggagagcaatgggcagccggagaacaactacaagaccac
gcctcccgtgctggactccgacggctccttcttcctctacagcaagctcaccgtggacaagagcaggtggcagcagggga
acgtcttctcatgctccgtgatgcatgaggctctgcacaaccactacacgcagaagagcctctccctgtctccgggtaaa
atctacatctgggcgcccttggccgggacttgtggggtccttctcctgtcactggttatcaccctttactgcaaacgggg
cagaaagaaactcctgtatatattcaaacaaccatttatgagaccagtacaaactactcaagaggaagatggctgtagct
gccgatttccagaagaagaagaaggaggatgtgaactgagagtgaagttcagcaggagcgcagacgcccccgcgtacaag
cagggccagaaccagctctataacgagctcaatctaggacgaagagaggagtacgatgttttggacaagagacgtggccg
ggaccctgagatggggggaaagccgagaaggaagaaccctcaggaaggcctgtacaatgaactgcagaaagataagatgg
cggaggcctacagtgagattgggatgaaaggcgagcgccggaggggcaaggggcacgatggcctttaccagggtctcagt
acagccaccaaggacacctacgacgcccttcacatgcaggccctgccccctcgctgataa
(amino acids)
(SEQ ID NO: 735)
MALPVTALLLPLALLLHAARPEVQLVESGGGLVKPGGSLRLSCAASGFTFSGYAMSWVRQAPGKGLEWVSTISSGGTYIY
YPDSVKGRFTISRDNAKNSLYLQMNSLRAEDTAVYYCARLGGDNYYEYFDVWGKGTTVTVSSGGGGSGGGGSGGGGSDIV
LTQSPASLAVSPGQRATITCRASKSVSTSGYSYMHWYQQKPGQPPKLLIYLASNLESGVPARFSGSGSGTDFTLTINPVE
ANDTANYYCQHSRELPFTFGGGTKVEIKRTESPKAQASSVPTAQPQAEGSLAKATTAPATTRNTGRGGEEKKKEKEKEEQ
EERETKTPEPKSCDKTHTCPPCPAPELLGGPSVFLFPPKPKDTLMISRTPEVTCVVVDVSHEDPEVKENWYVDGVEVHNA
KTKPREEQYNSTYRVVSVLTVLHQDWLNGKEYKCKVSNKALPAPIEKTISKAKGQPREPQVYTLPPSREEMTKNQVSLTC
LVKGFYPSDIAVEWESNGQPENNYKTTPPVLDSDGSFFLYSKLTVDKSRWQQGNVFSCSVMHEALHNHYTQKSLSLSPGK
IYIWAPLAGTCGVLLLSLVITLYCKRGRKKLLYIFKQPFMRPVQTTQEEDGCSCRFPEEEEGGCELRVKFSRSADAPAYK
QGQNQLYNELNLGRREEYDVLDKRRGRDPEMGGKPRRKNPQEGLYNELQKDKMAEAYSEIGMKGERRRGKGHDGLYQGLS
TATKDTYDALHMQALPPR**
CAR-T C2 FCHingeless Y407R/CD8/4-1BB/CD3z “FcH” CAR55
N-CD81s-huMNC2scFv-Human IgG1 hingeless Fc Y407R-CD8 transmembrane-4-1BB-
CD3zeta-C
(DNA)
(SEQ ID NO: 736)
atggccttaccagtgaccgccttgctcctgccgctggccttgctgctccacgccgccaggccggaggtgcagctggtgga
gtctgggggaggcctggtcaagcctggggggtccctgagactctcctgtgcagcctctggattcaccttcagtggctatg
ccatgagctgggtccgccaggctccagggaaggggctggagtgggtctcaaccattagtagtggcggaacctacatatac
taccccgactcagtgaagggccgattcaccatctccagagacaacgccaagaactcactgtatctgcaaatgaacagcct
gagagccgaggacacggccgtgtattactgtgcgagacttgggggggataattactacgaatacttcgatgtctggggca
aagggaccacggtcaccgtctcctccggcggtggcggatccggcggtggcggatccggcggtggcggatccgacattgtg
ctgacccagtctccagcctccttggccgtgtctccaggacagagggccaccatcacctgcagagccagtaagagtgtcag
taccagcggatactcctacatgcactggtatcagcagaaaccaggacaacctcctaaactcctgatttacctggcatcca
atctggagagcggggtcccagccaggttcagcggcagtgggtctgggaccgatttcaccctcacaattaatcctgtggaa
gctaatgatactgcaaattattactgtcagcacagtagggagctgcctttcacattcggcggagggaccaaggtggagat
caaacgaactgcacctgaactcctggggggaccgtcagtcttcctcttccccccaaaacccaaggacaccctcatgatct
cccggacccctgaggtcacatgcgtggtggtggacgtgagccacgaagaccctgaggtcaagttcaactggtacgtggac
ggcgtggaggtgcataatgccaagacaaagccgcgggaggagcagtacaacagcacgtaccgtgtggtcagcgtcctcac
cgtcctgcaccaggactggctgaatggcaaggagtacaagtgcaaggtctccaacaaagccctcccagcccccatcgaga
aaaccatctccaaagccaaagggcagccccgagaaccacaggtgtacaccctgcccccatcccgggaggagatgaccaag
aaccaggtcagcctgacctgcctggtcaaaggcttctatcccagcgacatcgccgtggagtgggagagcaatgggcagcc
ggagaacaactacaagaccacgcctcccgtgctggactccgacggctccttcttcctcaggagcaagctcaccgtggaca
agagcaggtggcagcaggggaacgtcttctcatgctccgtgatgcatgaggctctgcacaaccactacacgcagaagagc
ctctccctgtctccgggtaaaatctacatctgggcgcccttggccgggacttgtggggtccttctcctgtcactggttat
caccctttactgcaaacggggcagaaagaaactcctgtatatattcaaacaaccatttatgagaccagtacaaactactc
aagaggaagatggctgtagctgccgatttccagaagaagaagaaggaggatgtgaactgagagtgaagttcagcaggagc
gcagacgcccccgcgtacaagcagggccagaaccagctctataacgagctcaatctaggacgaagagaggagtacgatgt
tttggacaagagacgtggccgggaccctgagatggggggaaagccgagaaggaagaaccctcaggaaggcctgtacaatg
aactgcagaaagataagatggcggaggcctacagtgagattgggatgaaaggcgagcgccggaggggcaaggggcacgat
ggcctttaccagggtctcagtacagccaccaaggacacctacgacgcccttcacatgcaggccctgccccctcgctgata
a
(amino acids)
(SEQ ID NO: 737)
MALPVTALLLPLALLLHAARPEVQLVESGGGLVKPGGSLRLSCAASGFTFSGYAMSWVRQAPGKGLEWVSTISSGGTYIY
YPDSVKGRFTISRDNAKNSLYLQMNSLRAEDTAVYYCARLGGDNYYEYFDVWGKGTTVTVSSGGGGSGGGGSGGGGSDIV
LTQSPASLAVSPGQRATITCRASKSVSTSGYSYMHWYQQKPGQPPKLLIYLASNLESGVPARFSGSGSGTDFTLTINPVE
ANDTANYYCQHSRELPFTFGGGTKVEIKRTAPELLGGPSVFLFPPKPKDTLMISRTPEVTCVVVDVSHEDPEVKENWYVD
GVEVHNAKTKPREEQYNSTYRVVSVLTVLHQDWLNGKEYKCKVSNKALPAPIEKTISKAKGQPREPQVYTLPPSREEMTK
NQVSLTCLVKGFYPSDIAVEWESNGQPENNYKTTPPVLDSDGSFFLRSKLTVDKSRWQQGNVFSCSVMHEALHNHYTQKS
LSLSPGKIYIWAPLAGTCGVLLLSLVITLYCKRGRKKLLYIFKQPFMRPVQTTQEEDGCSCRFPEEEEGGCELRVKESRS
ADAPAYKQGQNQLYNELNLGRREEYDVLDKRRGRDPEMGGKPRRKNPQEGLYNELQKDKMAEAYSEIGMKGERRRGKGHD
GLYQGLSTATKDTYDALHMQALPPR**
CAR-T C2 IgD/FCHingeless Y407R/CD8/4-1BB/CD3z “IgD FcH” CAR56
N-CD81s-huMNC2scFv-IgD hinge-Human IgG1 hingeless Fc Y407R-CD8
transmembrane-4-1BB-CD3zeta-C
(DNA)
(SEQ ID NO: 738)
atggccttaccagtgaccgccttgctcctgccgctggccttgctgctccacgccgccaggccggaggtgcagctggtgga
gtctgggggaggcctggtcaagcctggggggtccctgagactctcctgtgcagcctctggattcaccttcagtggctatg
ccatgagctgggtccgccaggctccagggaaggggctggagtgggtctcaaccattagtagtggcggaacctacatatac
taccccgactcagtgaagggccgattcaccatctccagagacaacgccaagaactcactgtatctgcaaatgaacagcct
gagagccgaggacacggccgtgtattactgtgcgagacttgggggggataattactacgaatacttcgatgtctggggca
aagggaccacggtcaccgtctcctccggcggtggcggatccggcggtggcggatccggcggtggcggatccgacattgtg
ctgacccagtctccagcctccttggccgtgtctccaggacagagggccaccatcacctgcagagccagtaagagtgtcag
taccagcggatactcctacatgcactggtatcagcagaaaccaggacaacctcctaaactcctgatttacctggcatcca
atctggagagcggggtcccagccaggttcagcggcagtgggtctgggaccgatttcaccctcacaattaatcctgtggaa
gctaatgatactgcaaattattactgtcagcacagtagggagctgcctttcacattcggcggagggaccaaggtggagat
caaacgaactgagtctccaaaggcacaggcctcctcagtgcccactgcacaaccccaagcagagggcagcctcgccaagg
caaccacagccccagccaccacccgtaacacaggaagaggcggcgaagagaagaaaaaggagaaggagaaagaggaacaa
gaagagagagagacaaagacaccagcacctgaactcctggggggaccgtcagtcttcctcttccccccaaaacccaagga
caccctcatgatctcccggacccctgaggtcacatgcgtggtggtggacgtgagccacgaagaccctgaggtcaagttca
actggtacgtggacggcgtggaggtgcataatgccaagacaaagccgcgggaggagcagtacaacagcacgtaccgtgtg
gtcagcgtcctcaccgtcctgcaccaggactggctgaatggcaaggagtacaagtgcaaggtctccaacaaagccctccc
agcccccatcgagaaaaccatctccaaagccaaagggcagccccgagaaccacaggtgtacaccctgcccccatcccggg
aggagatgaccaagaaccaggtcagcctgacctgcctggtcaaaggcttctatcccagcgacatcgccgtggagtgggag
agcaatgggcagccggagaacaactacaagaccacgcctcccgtgctggactccgacggctccttcttcctcaggagcaa
gctcaccgtggacaagagcaggtggcagcaggggaacgtcttctcatgctccgtgatgcatgaggctctgcacaaccact
acacgcagaagagcctctccctgtctccgggtaaaatctacatctgggcgcccttggccgggacttgtggggtccttctc
ctgtcactggttatcaccctttactgcaaacggggcagaaagaaactcctgtatatattcaaacaaccatttatgagacc
agtacaaactactcaagaggaagatggctgtagctgccgatttccagaagaagaagaaggaggatgtgaactgagagtga
agttcagcaggagcgcagacgcccccgcgtacaagcagggccagaaccagctctataacgagctcaatctaggacgaaga
gaggagtacgatgttttggacaagagacgtggccgggaccctgagatggggggaaagccgagaaggaagaaccctcagga
aggcctgtacaatgaactgcagaaagataagatggcggaggcctacagtgagattgggatgaaaggcgagcgccggaggg
gcaaggggcacgatggcctttaccagggtctcagtacagccaccaaggacacctacgacgcccttcacatgcaggccctg
ccccctcgctgataa
(amino acids)
(SEQ ID NO: 739)
MALPVTALLLPLALLLHAARPEVQLVESGGGLVKPGGSLRLSCAASGFTFSGYAMSWVRQAPGKGLEWVSTISSGGTYIY
YPDSVKGRFTISRDNAKNSLYLQMNSLRAEDTAVYYCARLGGDNYYEYFDVWGKGTTVTVSSGGGGSGGGGSGGGGSDIV
LTQSPASLAVSPGQRATITCRASKSVSTSGYSYMHWYQQKPGQPPKLLIYLASNLESGVPARFSGSGSGTDFTLTINPVE
ANDTANYYCQHSRELPFTFGGGTKVEIKRTESPKAQASSVPTAQPQAEGSLAKATTAPATTRNTGRGGEEKKKEKEKEEQ
EERETKTPAPELLGGPSVFLFPPKPKDTLMISRTPEVTCVVVDVSHEDPEVKFNWYVDGVEVHNAKTKPREEQYNSTYRV
VSVLTVLHQDWLNGKEYKCKVSNKALPAPIEKTISKAKGQPREPQVYTLPPSREEMTKNQVSLTCLVKGFYPSDIAVEWE
SNGQPENNYKTTPPVLDSDGSFFLRSKLTVDKSRWQQGNVFSCSVMHEALHNHYTQKSLSLSPGKIYIWAPLAGTCGVLL
LSLVITLYCKRGRKKLLYIFKQPFMRPVQTTQEEDGCSCRFPEEEEGGCELRVKFSRSADAPAYKQGQNQLYNELNLGRR
EEYDVLDKRRGRDPEMGGKPRRKNPQEGLYNELQKDKMAEAYSEIGMKGERRRGKGHDGLYQGLSTATKDTYDALHMQAL
PPR**
CAR-T C2 IgD/CD8/4-1BB/CD3z “IgD” CAR57
N-CD81s-huMNC2scFv-IgD hinge-CD8 transmembrane-4-1BB-CD3zeta-C
(DNA)
(SEQ ID NO: 740)
atggccttaccagtgaccgccttgctcctgccgctggccttgctgctccacgccgccaggccggaggtgcagctggtgga
gtctgggggaggcctggtcaagcctggggggtccctgagactctcctgtgcagcctctggattcaccttcagtggctatg
ccatgagctgggtccgccaggctccagggaaggggctggagtgggtctcaaccattagtagtggcggaacctacatatac
taccccgactcagtgaagggccgattcaccatctccagagacaacgccaagaactcactgtatctgcaaatgaacagcct
gagagccgaggacacggccgtgtattactgtgcgagacttgggggggataattactacgaatacttcgatgtctggggca
aagggaccacggtcaccgtctcctccggcggtggcggatccggcggtggcggatccggcggtggcggatccgacattgtg
ctgacccagtctccagcctccttggccgtgtctccaggacagagggccaccatcacctgcagagccagtaagagtgtcag
taccagcggatactcctacatgcactggtatcagcagaaaccaggacaacctcctaaactcctgatttacctggcatcca
atctggagagcggggtcccagccaggttcagcggcagtgggtctgggaccgatttcaccctcacaattaatcctgtggaa
gctaatgatactgcaaattattactgtcagcacagtagggagctgcctttcacattcggcggagggaccaaggtggagat
caaacgaactgagtctccaaaggcacaggcctcctcagtgcccactgcacaaccccaagcagagggcagcctcgccaagg
caaccacagccccagccaccacccgtaacacaggaagaggcggcgaagagaagaaaaaggagaaggagaaagaggaacaa
gaagagagagagacaaagacaccaatctacatctgggcgcccttggccgggacttgtggggtccttctcctgtcactggt
tatcaccctttactgcaaacggggcagaaagaaactcctgtatatattcaaacaaccatttatgagaccagtacaaacta
ctcaagaggaagatggctgtagctgccgatttccagaagaagaagaaggaggatgtgaactgagagtgaagttcagcagg
agcgcagacgcccccgcgtacaagcagggccagaaccagctctataacgagctcaatctaggacgaagagaggagtacga
tgttttggacaagagacgtggccgggaccctgagatggggggaaagccgagaaggaagaaccctcaggaaggcctgtaca
atgaactgcagaaagataagatggcggaggcctacagtgagattgggatgaaaggcgagcgccggaggggcaaggggcac
gatggcctttaccagggtctcagtacagccaccaaggacacctacgacgcccttcacatgcaggccctgccccctcgctg
ataa
(amino acids)
(SEQ ID NO: 741)
MALPVTALLLPLALLLHAARPEVQLVESGGGLVKPGGSLRLSCAASGFTFSGYAMSWVRQAPGKGLEWVSTISSGGTYIY
YPDSVKGRFTISRDNAKNSLYLQMNSLRAEDTAVYYCARLGGDNYYEYFDVWGKGTTVTVSSGGGGSGGGGSGGGGSDIV
LTQSPASLAVSPGQRATITCRASKSVSTSGYSYMHWYQQKPGQPPKLLIYLASNLESGVPARFSGSGSGTDFTLTINPVE
ANDTANYYCQHSRELPFTFGGGTKVEIKRTESPKAQASSVPTAQPQAEGSLAKATTAPATTRNTGRGGEEKKKEKEKEEQ
EERETKTPIYIWAPLAGTCGVLLLSLVITLYCKRGRKKLLYIFKQPFMRPVQTTQEEDGCSCRFPEEEEGGCELRVKESR
SADAPAYKQGQNQLYNELNLGRREEYDVLDKRRGRDPEMGGKPRRKNPQEGLYNELQKDKMAEAYSEIGMKGERRRGKGH
DGLYQGLSTATKDTYDALHMQALPPR**
CAR-T C2 X4/CD8/4-1BB/CD3z “X4” CAR58
N-CD8ls-huMNC2scFv-X4 linker-CD8 transmembrane-4-1BB-CD3zeta-C
(DNA)
(SEQ ID NO: 742)
atggccttaccagtgaccgccttgctcctgccgctggccttgctgctccacgccgccaggccggaggtgcagctggtgga
gtctgggggaggcctggtcaagcctggggggtccctgagactctcctgtgcagcctctggattcaccttcagtggctatg
ccatgagctgggtccgccaggctccagggaaggggctggagtgggtctcaaccattagtagtggcggaacctacatatac
taccccgactcagtgaagggccgattcaccatctccagagacaacgccaagaactcactgtatctgcaaatgaacagcct
gagagccgaggacacggccgtgtattactgtgcgagacttgggggggataattactacgaatacttcgatgtctggggca
aagggaccacggtcaccgtctcctccggcggtggcggatccggcggtggcggatccggcggtggcggatccgacattgtg
ctgacccagtctccagcctccttggccgtgtctccaggacagagggccaccatcacctgcagagccagtaagagtgtcag
taccagcggatactcctacatgcactggtatcagcagaaaccaggacaacctcctaaactcctgatttacctggcatcca
atctggagagcggggtcccagccaggttcagcggcagtgggtctgggaccgatttcaccctcacaattaatcctgtggaa
gctaatgatactgcaaattattactgtcagcacagtagggagctgcctttcacattcggcggagggaccaaggtggagat
caaacgaactgacaagacgcacaccaagccacctaaaccagctccagaactgctcggaggtcctggcaccggaaccggag
gacctaccatcaaaccacctaagccacctaagcctgctcctaacctgctcggaggacctatctacatctgggcgcccttg
gccgggacttgtggggtccttctcctgtcactggttatcaccctttactgcaaacggggcagaaagaaactcctgtatat
attcaaacaaccatttatgagaccagtacaaactactcaagaggaagatggctgtagctgccgatttccagaagaagaag
aaggaggatgtgaactgagagtgaagttcagcaggagcgcagacgcccccgcgtacaagcagggccagaaccagctctat
aacgagctcaatctaggacgaagagaggagtacgatgttttggacaagagacgtggccgggaccctgagatggggggaaa
gccgagaaggaagaaccctcaggaaggcctgtacaatgaactgcagaaagataagatggcggaggcctacagtgagattg
ggatgaaaggcgagcgccggaggggcaaggggcacgatggcctttaccagggtctcagtacagccaccaaggacacctac
gacgcccttcacatgcaggccctgccccctcgctgataa
(amino acids)
(SEQ ID NO: 743)
MALPVTALLLPLALLLHAARPEVQLVESGGGLVKPGGSLRLSCAASGFTFSGYAMSWVRQAPGKGLEWVSTISSGGTYIY
YPDSVKGRFTISRDNAKNSLYLQMNSLRAEDTAVYYCARLGGDNYYEYFDVWGKGTTVTVSSGGGGSGGGGSGGGGSDIV
LTQSPASLAVSPGQRATITCRASKSVSTSGYSYMHWYQQKPGQPPKLLIYLASNLESGVPARFSGSGSGTDFTLTINPVE
ANDTANYYCQHSRELPFTFGGGTKVEIKRTDKTHTKPPKPAPELLGGPGTGTGGPTIKPPKPPKPAPNLLGGPIYIWAPL
AGTCGVLLLSLVITLYCKRGRKKLLYIFKQPFMRPVQTTQEEDGCSCRFPEEEEGGCELRVKFSRSADAPAYKQGQNQLY
NELNLGRREEYDVLDKRRGRDPEMGGKPRRKNPQEGLYNELQKDKMAEAYSEIGMKGERRRGKGHDGLYQGLSTATKDTY
DALHMQALPPR**
CAR-T E6 CD8/CD4/41BB/CD3z CAR37
N-CD8ls-huMNE6scFv-CD8ecd-CD4 transmembrane-4-1BB-CD3zeta-C
(DNA)
(SEQ ID NO: 744)
atggccctgcccgtgaccgctttgctgctccccctggcgctgctgctgcacgccgccaggccagaggtccagctggttgag
agtggcggtgggctggttaagcctggcggctccctgcggctgagctgcgccgcgagtggatttactttcagccgatatggg
atgagttgggtgcggcaagctcccgggaagaggctggaatgggtctcaacaatctccggggggggcacttacatctattac
cccgactcagtcaaggggagatttaccatttcacgagacaacgctaagaataccctgtatttgcagatgaattctctgaga
gcagaggacacagctgtttactattgtacccgcgacaactatggcaggaactacgactacggtatggactattggggacaa
gggacattggttacagtgagcagtggcggcgggggcagcggaggaggaggcagcggtggcggaggcagcgagatagtgctc
acgcagtcacccgcgactctcagtctctcacctggggaacgagctaccctgacgtgctctgctacctcctcagtgtcatat
attcactggtatcagcaacggcccgggcagtcccctagattgctcatttatagtacctctaatctggcctcaggtatccct
gcacgattttctggatctggttcaggttctgattacaccctcactatctctagcctggagcctgaagactttgccgtttat
tactgccagcagaggtctagctccccattcacctttgggagtgggaccaaggttgaaattaaaacgacaaccccggccccc
agaccaccaacgccagcccccaccatcgccagccaacccctgtctctgagaccagaagcctgtaggcctgccgccggtgga
gctgtgcacacaagaggactggatttcgcctgtgatatggccctgattgtgctggggggcgtcgccggcctcctgcttttc
attgggctaggcatcttcttcaaaaggggccgcaaaaaactcctttacatttttaagcagccttttatgaggccagtacag
acgactcaagaggaagacgggtgctcatgccgctttcctgaggaggaggaaggagggtgcgaactgcgcgttaagttctcc
cgatcagccgacgcgcctgcttacaagcagggccagaaccaactgtacaacgagctgaatctcggtagacgggaagagtac
gacgtgttggacaaacggagaggccgcgacccagaaatgggcggcaagcctcgcaggaaaaacccccaggagggactgtac
aatgagttgcagaaagataagatggcagaagcttatagcgagatcggaatgaagggggaaaggagacgagggaaaggacac
gacggcctttatcagggcctgtccacagcaacaaaagatacgtatgacgccctccatatgcaggcacttccaccacggtga
taa
(amino acids)
(SEQ ID NO: 745)
MALPVTALLLPLALLLHAARPEVQLVESGGGLVKPGGSLRLSCAASGFTFSRYGMSWVRQAPGKRLEWVSTISGGGTYIY
YPDSVKGRFTISRDNAKNTLYLQMNSLRAEDTAVYYCTRDNYGRNYDYGMDYWGQGTLVTVSSGGGGSGGGGSGGGGSEI
VLTQSPATLSLSPGERATLTCSATSSVSYIHWYQQRPGQSPRLLIYSTSNLASGIPARFSGSGSGSDYTLTISSLEPEDF
AVYYCQQRSSSPFTFGSGTKVEIKTTTPAPRPPTPAPTIASQPLSLRPEACRPAAGGAVHTRGLDFACDMALIVLGGVAG
LLLFIGLGIFFKRGRKKLLYIFKQPFMRPVQTTQEEDGCSCRFPEEEEGGCELRVKFSRSADAPAYKQGQNQLYNELNLG
RREEYDVLDKRRGRDPEMGGKPRRKNPQEGLYNELQKDKMAEAYSEIGMKGERRRGKGHDGLYQGLSTATKDTYDALHMQ
ALPPR**
CAR-T E6 CD4/CD4/CD3z sequence CAR23:
N-CD8ls-huMNE6scFv-CD4ecd-CD4 transmembrane-CD3zeta-C
(DNA)
(SEQ ID NO: 746)
atggccctgcccgtgaccgctttgctgctccccctggcgctgctgctgcacgccgccaggccagaggtccagctggttgag
agtggcggtgggctggttaagcctggcggctccctgcggctgagctgcgccgcgagtggatttactttcagccgatatggg
atgagttgggtgcggcaagctcccgggaagaggctggaatgggtctcaacaatctccggggggggcacttacatctattac
cccgactcagtcaaggggagatttaccatttcacgagacaacgctaagaataccctgtatttgcagatgaattctctgaga
gcagaggacacagctgtttactattgtacccgcgacaactatggcaggaactacgactacggtatggactattggggacaa
gggacattggttacagtgagcagtggcggcgggggcagcggaggaggaggcagcggtggggggggcagcgagatagtgctc
acgcagtcacccgcgactctcagtctctcacctggggaacgagctaccctgacgtgctctgctacctcctcagtgtcatat
attcactggtatcagcaacggcccgggcagtcccctagattgctcatttatagtacctctaatctggcctcaggtatccct
gcacgattttctggatctggttcaggttctgattacaccctcactatctctagcctggagcctgaagactttgccgtttat
tactgccagcagaggtctagctccccattcacctttgggagtgggaccaaggttgaaattaaatcgggacaggtcctgctg
gaatccaacatcaaggttctgcccacatggtccaccccggtgcagccaatggccctgattgtgctggggggcgtcgccggc
ctcctgcttttcattgggctaggcatcttcttccgcgttaagttctcccgatcagccgacgcgcctgcttacaagcagggc
cagaaccaactgtacaacgagctgaatctcggtagacgggaagagtacgacgtgttggacaaacggagaggccgcgaccca
gaaatgggcggcaagcctcgcaggaaaaacccccaggagggactgtacaatgagttgcagaaagataagatggcagaagct
tatagcgagatcggaatgaagggggaaaggagacgagggaaaggacacgacggcctttatcagggcctgtccacagcaaca
aaagatacgtatgacgccctccatatgcaggcacttccaccacggtgataa
(amino acids)
(SEQ ID NO: 747)
MALPVTALLLPLALLLHAARPEVQLVESGGGLVKPGGSLRLSCAASGFTFSRYGMSWVRQAPGKRLEWVSTISGGGTYIY
YPDSVKGRFTISRDNAKNTLYLQMNSLRAEDTAVYYCTRDNYGRNYDYGMDYWGQGTLVTVSSGGGGSGGGGSGGGGSEI
VLTQSPATLSLSPGERATLTCSATSSVSYIHWYQQRPGQSPRLLIYSTSNLASGIPARFSGSGSGSDYTLTISSLEPEDF
AVYYCQQRSSSPFTFGSGTKVEIKSGQVLLESNIKVLPTWSTPVQPMALIVLGGVAGLLLFIGLGIFFRVKFSRSADAPA
YKQGQNQLYNELNLGRREEYDVLDKRRGRDPEMGGKPRRKNPQEGLYNELQKDKMAEAYSEIGMKGERRRGKGHDGLYQG
LSTATKDTYDALHMQALPPR**
CAR-T E6 CD4/CD4/CD28/CD3z sequence CAR25:
N-CD8ls-huMNE6scFv-CD4ecd-CD4 transmembrane-CD28-CD3zeta-C
(DNA)
(SEQ ID NO: 748)
atggccctgcccgtgaccgctttgctgctccccctggcgctgctgctgcacgccgccaggccagaggtccagctggttgag
agtggcggtgggctggttaagcctggcggctccctgcggctgagctgcgccgcgagtggatttactttcagccgatatggg
atgagttgggtgcggcaagctcccgggaagaggctggaatgggtctcaacaatctccggggggggcacttacatctattac
cccgactcagtcaaggggagatttaccatttcacgagacaacgctaagaataccctgtatttgcagatgaattctctgaga
gcagaggacacagctgtttactattgtacccgcgacaactatggcaggaactacgactacggtatggactattggggacaa
gggacattggttacagtgagcagtggcggcgggggcagcggaggaggaggcagcggtggggggggcagcgagatagtgctc
acgcagtcacccgcgactctcagtctctcacctggggaacgagctaccctgacgtgctctgctacctcctcagtgtcatat
attcactggtatcagcaacggcccgggcagtcccctagattgctcatttatagtacctctaatctggcctcaggtatccct
gcacgattttctggatctggttcaggttctgattacaccctcactatctctagcctggagcctgaagactttgccgtttat
tactgccagcagaggtctagctccccattcacctttgggagtgggaccaaggttgaaattaaatcgggacaggtcctgctg
gaatccaacatcaaggttctgcccacatggtccaccccggtgcagccaatggccctgattgtgctggggggcgtcgccggc
ctcctgcttttcattgggctaggcatcttcttcagaagcaagcggtctcggctcctgcattctgattacatgaacatgacc
ccaagaagaccaggccccaccaggaaacattaccagccctacgctccgccacgcgacttcgctgcctaccggtcccgcgtt
aagttctcccgatcagccgacgcgcctgcttacaagcagggccagaaccaactgtacaacgagctgaatctcggtagacgg
gaagagtacgacgtgttggacaaacggagaggccgcgacccagaaatgggcggcaagcctcgcaggaaaaacccccaggag
ggactgtacaatgagttgcagaaagataagatggcagaagcttatagcgagatcggaatgaagggggaaaggagacgaggg
aaaggacacgacggcctttatcagggcctgtccacagcaacaaaagatacgtatgacgccctccatatgcaggcacttcca
ccacggtgataa
(amino acids)
(SEQ ID NO: 749)
MALPVTALLLPLALLLHAARPEVQLVESGGGLVKPGGSLRLSCAASGFTFSRYGMSWVRQAPGKRLEWVSTISGGGTYIY
YPDSVKGRFTISRDNAKNTLYLQMNSLRAEDTAVYYCTRDNYGRNYDYGMDYWGQGTLVTVSSGGGGSGGGGSGGGGSEI
VLTQSPATLSLSPGERATLTCSATSSVSYIHWYQQRPGQSPRLLIYSTSNLASGIPARFSGSGSGSDYTLTISSLEPEDF
AVYYCQQRSSSPFTFGSGTKVEIKSGQVLLESNIKVLPTWSTPVQPMALIVLGGVAGLLLFIGLGIFFRSKRSRLLHSDY
MNMTPRRPGPTRKHYQPYAPPRDFAAYRSRVKFSRSADAPAYKQGQNQLYNELNLGRREEYDVLDKRRGRDPEMGGKPRR
KNPQEGLYNELQKDKMAEAYSEIGMKGERRRGKGHDGLYQGLSTATKDTYDALHMQALPPR**
CAR-T E6 CD4/CD4/4-1BB/CD3z sequence CAR31:
N-CD81s-huMNE6scFv-CD4ecd-CD4 transmembrane-4-1BB-CD3zeta-C
(DNA)
(SEQ ID NO: 750)
atggccctgcccgtgaccgctttgctgctccccctggcgctgctgctgcacgccgccaggccagaggtccagctggttgag
agtggcggtgggctggttaagcctggcggctccctgcggctgagctgcgccgcgagtggatttactttcagccgatatggg
atgagttgggtgcggcaagctcccgggaagaggctggaatgggtctcaacaatctccggggggggcacttacatctattac
cccgactcagtcaaggggagatttaccatttcacgagacaacgctaagaataccctgtatttgcagatgaattctctgaga
gcagaggacacagctgtttactattgtacccgcgacaactatggcaggaactacgactacggtatggactattggggacaa
gggacattggttacagtgagcagtggcggcgggggcagcggaggaggaggcagcggtggggggggcagcgagatagtgctc
acgcagtcacccgcgactctcagtctctcacctggggaacgagctaccctgacgtgctctgctacctcctcagtgtcatat
attcactggtatcagcaacggcccgggcagtcccctagattgctcatttatagtacctctaatctggcctcaggtatccct
gcacgattttctggatctggttcaggttctgattacaccctcactatctctagcctggagcctgaagactttgccgtttat
tactgccagcagaggtctagctccccattcacctttgggagtgggaccaaggttgaaattaaatcgggacaggtcctgctg
gaatccaacatcaaggttctgcccacatggtccaccccggtgcagccaatggccctgattgtgctggggggcgtcgccggc
ctcctgcttttcattgggctaggcatcttcttcaaaaggggccgcaaaaaactcctttacatttttaagcagccttttatg
aggccagtacagacgactcaagaggaagacgggtgctcatgccgctttcctgaggaggaggaaggagggtgcgaactgcgc
gttaagttctcccgatcagccgacgcgcctgcttacaagcagggccagaaccaactgtacaacgagctgaatctcggtaga
cgggaagagtacgacgtgttggacaaacggagaggccgcgacccagaaatgggcggcaagcctcgcaggaaaaacccccag
gagggactgtacaatgagttgcagaaagataagatggcagaagcttatagcgagatcggaatgaagggggaaaggagacga
gggaaaggacacgacggcctttatcagggcctgtccacagcaacaaaagatacgtatgacgccctccatatgcaggcactt
ccaccacggtgataa
(amino acids)
(SEQ ID NO: 751)
MALPVTALLLPLALLLHAARPEVQLVESGGGLVKPGGSLRLSCAASGFTFSRYGMSWVRQAPGKRLEWVSTISGGGTYIY
YPDSVKGRFTISRDNAKNTLYLQMNSLRAEDTAVYYCTRDNYGRNYDYGMDYWGQGTLVTVSSGGGGSGGGGSGGGGSEI
VLTQSPATLSLSPGERATLTCSATSSVSYIHWYQQRPGQSPRLLIYSTSNLASGIPARFSGSGSGSDYTLTISSLEPEDF
AVYYCQQRSSSPFTFGSGTKVEIKSGQVLLESNIKVLPTWSTPVQPMALIVLGGVAGLLLFIGLGIFFKRGRKKLLYIFK
QPFMRPVQTTQEEDGCSCRFPEEEEGGCELRVKFSRSADAPAYKQGQNQLYNELNLGRREEYDVLDKRRGRDPEMGGKPR
RKNPQEGLYNELQKDKMAEAYSEIGMKGERRRGKGHDGLYQGLSTATKDTYDALHMQALPPR**
CAR-T E6 CD4/CD4/OX40/CD3z sequence:
N-CD8ls-huMNE6scFv-CD4ecd-CD4 transmembrane-OX40-CD3zeta-C
(DNA)
(SEQ ID NO: 752)
atggccctgcccgtgaccgctttgctgctccccctggcgctgctgctgcacgccgccaggccagaggtccagctggttga
gagtggcggtgggctggttaagcctggcggctccctgcggctgagctgcgccgcgagtggatttactttcagccgatatg
ggatgagttgggtgcggcaagctcccgggaagaggctggaatgggtctcaacaatctccggggggggcacttacatctat
taccccgactcagtcaaggggagatttaccatttcacgagacaacgctaagaataccctgtatttgcagatgaattctct
gagagcagaggacacagctgtttactattgtacccgcgacaactatggcaggaactacgactacggtatggactattggg
gacaagggacattggttacagtgagcagtggcggcgggggcagcggaggaggaggcagcggtggggggggcagcgagata
gtgctcacgcagtcacccgcgactctcagtctctcacctggggaacgagctaccctgacgtgctctgctacctcctcagt
gtcatatattcactggtatcagcaacggcccgggcagtcccctagattgctcatttatagtacctctaatctggcctcag
gtatccctgcacgattttctggatctggttcaggttctgattacaccctcactatctctagcctggagcctgaagacttt
gccgtttattactgccagcagaggtctagctccccattcacctttgggagtgggaccaaggttgaaattaaatcgggaca
ggtcctgctggaatccaacatcaaggttctgcccacatggtccaccccggtgcagccaatggccctgattgtgctggggg
gcgtcgccggcctcctgcttttcattgggctaggcatcttcttccggagggaccagaggctgccccccgatgcccacaag
ccccctgggggaggcagtttccggacccccatccaagaggagcaggccgacgcccactccaccctggccaagatccgcgt
taagttctcccgatcagccgacgcgcctgcttacaagcagggccagaaccaactgtacaacgagctgaatctcggtagac
gggaagagtacgacgtgttggacaaacggagaggccgcgacccagaaatgggcggcaagcctcgcaggaaaaacccccag
gagggactgtacaatgagttgcagaaagataagatggcagaagcttatagcgagatcggaatgaagggggaaaggagacg
agggaaaggacacgacggcctttatcagggcctgtccacagcaacaaaagatacgtatgacgccctccatatgcaggcac
ttccaccacggtgataa
(amino acids)
(SEQ ID NO: 753)
MALPVTALLLPLALLLHAARPEVQLVESGGGLVKPGGSLRLSCAASGFTFSRYGMSWVRQAPGKRLEWVSTISGGGTYIY
YPDSVKGRFTISRDNAKNTLYLQMNSLRAEDTAVYYCTRDNYGRNYDYGMDYWGQGTLVTVSSGGGGSGGGGSGGGGSEI
VLTQSPATLSLSPGERATLTCSATSSVSYIHWYQQRPGQSPRLLIYSTSNLASGIPARFSGSGSGSDYTLTISSLEPEDF
AVYYCQQRSSSPFTFGSGTKVEIKSGQVLLESNIKVLPTWSTPVQPMALIVLGGVAGLLLFIGLGIFFRRDQRLPPDAHK
PPGGGSFRTPIQEEQADAHSTLAKIRVKFSRSADAPAYKQGQNQLYNELNLGRREEYDVLDKRRGRDPEMGGKPRRKNPQ
EGLYNELQKDKMAEAYSEIGMKGERRRGKGHDGLYQGLSTATKDTYDALHMQALPPR**
CAR-T E6 CD4/CD4/CD28/4-1BB/CD3z sequence CAR38:
N-CD8ls-huMNE6scFv-CD4ecd-CD4 transmembrane-CD28-4-1BB-CD3zeta-C
(DNA)
(SEQ ID NO: 754)
atggccctgcccgtgaccgctttgctgctccccctggcgctgctgctgcacgccgccaggccagaggtccagctggttgag
agtggcggtgggctggttaagcctggcggctccctgcggctgagctgcgccgcgagtggatttactttcagccgatatggg
atgagttgggtgcggcaagctcccgggaagaggctggaatgggtctcaacaatctccggggggggcacttacatctattac
cccgactcagtcaaggggagatttaccatttcacgagacaacgctaagaataccctgtatttgcagatgaattctctgaga
gcagaggacacagctgtttactattgtacccgcgacaactatggcaggaactacgactacggtatggactattggggacaa
gggacattggttacagtgagcagtggcggcgggggcagcggaggaggaggcagcggtggggggggcagcgagatagtgctc
acgcagtcacccgcgactctcagtctctcacctggggaacgagctaccctgacgtgctctgctacctcctcagtgtcatat
attcactggtatcagcaacggcccgggcagtcccctagattgctcatttatagtacctctaatctggcctcaggtatccct
gcacgattttctggatctggttcaggttctgattacaccctcactatctctagcctggagcctgaagactttgccgtttat
tactgccagcagaggtctagctccccattcacctttgggagtgggaccaaggttgaaattaaatcgggacaggtcctgctg
gaatccaacatcaaggttctgcccacatggtccaccccggtgcagccaatggccctgattgtgctggggggcgtcgccggc
ctcctgcttttcattgggctaggcatcttcttcagaagcaagcggtctcggctcctgcattctgattacatgaacatgacc
ccaagaagaccaggccccaccaggaaacattaccagccctacgctccgccacgcgacttcgctgcctaccggtccaaaagg
ggccgcaaaaaactcctttacatttttaagcagccttttatgaggccagtacagacgactcaagaggaagacgggtgctca
tgccgctttcctgaggaggaggaaggagggtgcgaactgcgcgttaagttctcccgatcagccgacgcgcctgcttacaag
cagggccagaaccaactgtacaacgagctgaatctcggtagacgggaagagtacgacgtgttggacaaacggagaggccgc
gacccagaaatgggcggcaagcctcgcaggaaaaacccccaggagggactgtacaatgagttgcagaaagataagatggca
gaagcttatagcgagatcggaatgaagggggaaaggagacgagggaaaggacacgacggcctttatcagggcctgtccaca
gcaacaaaagatacgtatgacgccctccatatgcaggcacttccaccacggtgataa
(amino acids)
(SEQ ID NO: 755)
MALPVTALLLPLALLLHAARPEVQLVESGGGLVKPGGSLRLSCAASGFTFSRYGMSWVRQAPGKRLEWVSTISGGGTYIY
YPDSVKGRFTISRDNAKNTLYLQMNSLRAEDTAVYYCTRDNYGRNYDYGMDYWGQGTLVTVSSGGGGSGGGGSGGGGSEI
VLTQSPATLSLSPGERATLTCSATSSVSYIHWYQQRPGQSPRLLIYSTSNLASGIPARFSGSGSGSDYTLTISSLEPEDF
AVYYCQQRSSSPFTFGSGTKVEIKSGQVLLESNIKVLPTWSTPVQPMALIVLGGVAGLLLFIGLGIFFRSKRSRLLHSDY
MNMTPRRPGPTRKHYQPYAPPRDFAAYRSKRGRKKLLYIFKQPFMRPVQTTQEEDGCSCRFPEEEEGGCELRVKESRSAD
APAYKQGQNQLYNELNLGRREEYDVLDKRRGRDPEMGGKPRRKNPQEGLYNELQKDKMAEAYSEIGMKGERRRGKGHDGL
YQGLSTATKDTYDALHMQALPPR**
CAR-T E6 CD4/CD4/CD28/0X40/CD3z sequence:
N-CD8ls-huMNE6scFv-CD4ecd-CD4 transmembrane-CD28-OX40-CD3zeta-C
(DNA)
(SEQ ID NO: 756)
atggccctgcccgtgaccgctttgctgctccccctggcgctgctgctgcacgccgccaggccagaggtccagctggttga
gagtggcggtgggctggttaagcctggcggctccctgcggctgagctgcgccgcgagtggatttactttcagccgatatg
ggatgagttgggtgcggcaagctcccgggaagaggctggaatgggtctcaacaatctccggggggggcacttacatctat
taccccgactcagtcaaggggagatttaccatttcacgagacaacgctaagaataccctgtatttgcagatgaattctct
gagagcagaggacacagctgtttactattgtacccgcgacaactatggcaggaactacgactacggtatggactattggg
gacaagggacattggttacagtgagcagtggcggcgggggcagcggaggaggaggcagcggtggggggggcagcgagata
gtgctcacgcagtcacccgcgactctcagtctctcacctggggaacgagctaccctgacgtgctctgctacctcctcagt
gtcatatattcactggtatcagcaacggcccgggcagtcccctagattgctcatttatagtacctctaatctggcctcag
gtatccctgcacgattttctggatctggttcaggttctgattacaccctcactatctctagcctggagcctgaagacttt
gccgtttattactgccagcagaggtctagctccccattcacctttgggagtgggaccaaggttgaaattaaatcgggaca
ggtcctgctggaatccaacatcaaggttctgcccacatggtccaccccggtgcagccaatggccctgattgtgctggggg
gcgtcgccggcctcctgcttttcattgggctaggcatcttcttcagaagcaagcggtctcggctcctgcattctgattac
atgaacatgaccccaagaagaccaggccccaccaggaaacattaccagccctacgctccgccacgcgacttcgctgccta
ccggtcccggagggaccagaggctgccccccgatgcccacaagccccctgggggaggcagtttccggacccccatccaag
aggagcaggccgacgcccactccaccctggccaagatccgcgttaagttctcccgatcagccgacgcgcctgcttacaag
cagggccagaaccaactgtacaacgagctgaatctcggtagacgggaagagtacgacgtgttggacaaacggagaggccg
cgacccagaaatgggcggcaagcctcgcaggaaaaacccccaggagggactgtacaatgagttgcagaaagataagatgg
cagaagcttatagcgagatcggaatgaagggggaaaggagacgagggaaaggacacgacggcctttatcagggcctgtcc
acagcaacaaaagatacgtatgacgccctccatatgcaggcacttccaccacggtgataa
(amino acids)
(SEQ ID NO: 757)
MALPVTALLLPLALLLHAARPEVQLVESGGGLVKPGGSLRLSCAASGFTFSRYGMSWVRQAPGKRLEWVSTISGGGTYIY
YPDSVKGRFTISRDNAKNTLYLQMNSLRAEDTAVYYCTRDNYGRNYDYGMDYWGQGTLVTVSSGGGGSGGGGSGGGGSEI
VLTQSPATLSLSPGERATLTCSATSSVSYIHWYQQRPGQSPRLLIYSTSNLASGIPARFSGSGSGSDYTLTISSLEPEDF
AVYYCQQRSSSPFTFGSGTKVEIKSGQVLLESNIKVLPTWSTPVQPMALIVLGGVAGLLLFIGLGIFFRSKRSRLLHSDY
MNMTPRRPGPTRKHYQPYAPPRDFAAYRSRRDQRLPPDAHKPPGGGSFRTPIQEEQADAHSTLAKIRVKFSRSADAPAYK
QGQNQLYNELNLGRREEYDVLDKRRGRDPEMGGKPRRKNPQEGLYNELQKDKMAEAYSEIGMKGERRRGKGHDGLYQGLS
TATKDTYDALHMQALPPR**
CAR-T C2 CD4/CD4/CD3z sequence:
N-CD8ls-huMNC2scFv-CD4ecd-CD4 transmembrane-CD3zeta-C
(DNA)
(SEQ ID NO: 758)
atggccttgccagtgacggccctgctgctgccattggctcttctgttgcacgctgccaggcctgaagtgcagctcgtagag
agtggcgggggactggtgaagcccggtggaagcctcagactcagttgcgccgcctcaggtttcactttttcaggttacgcc
atgtcctgggtaagacaggcaccggggaaaggactcgagtgggtgtctactatcagctcaggaggcacttatatatattat
cctgactctgtaaaaggccgatttacgatttctcgcgacaatgcaaagaactccctctacctccaaatgaacagtcttagg
gcagaagacactgctgtatactattgtgcacgcctcggcggcgacaactactacgagtactttgacgtgtgggggaaaggg
actaccgtgacagtttcaagcggaggaggtggctcaggtggaggcgggtcaggggggggaggaagtgatattgtgctcaca
caatccccagcctccctggctgtgtctcccggccaacgcgctacaattacatgtcgggcctccaaaagcgtgagcaccagc
ggctacagctacatgcactggtatcaacagaaaccaggacaaccccccaaactgttgatttatctcgcttcaaacttggag
tccggcgtgcctgcgcgcttttcagggagtgggagcggcacagattttacgctgactatcaaccccgtagaagcaaacgat
acagcgaattattattgtcaacattcccgggaactcccctttacgttcggcgggggcacaaaggtcgaaattaagagaacc
tcgggacaggtcctgctggaatccaacatcaaggttctgcccacatggtccaccccggtgcagccaatggccctgattgtg
ctggggggcgtcgccggcctcctgcttttcattgggctaggcatcttcttccgcgttaagttctcccgatcagccgacgcg
cctgcttacaagcagggccagaaccaactgtacaacgagctgaatctcggtagacgggaagagtacgacgtgttggacaaa
cggagaggccgcgacccagaaatgggcggcaagcctcgcaggaaaaacccccaggagggactgtacaatgagttgcagaaa
gataagatggcagaagcttatagcgagatcggaatgaagggggaaaggagacgagggaaaggacacgacggcctttatcag
ggcctgtccacagcaacaaaagatacgtatgacgccctccatatgcaggcacttccaccacggtgataa
(amino acids)
(SEQ ID NO: 759)
MALPVTALLLPLALLLHAARPEVQLVESGGGLVKPGGSLRLSCAASGFTFSGYAMSWVRQAPGKGLEWVSTISSGGTYIY
YPDSVKGRFTISRDNAKNSLYLQMNSLRAEDTAVYYCARLGGDNYYEYFDVWGKGTTVTVSSGGGGSGGGGSGGGGSDIV
LTQSPASLAVSPGQRATITCRASKSVSTSGYSYMHWYQQKPGQPPKLLIYLASNLESGVPARFSGSGSGTDFTLTINPVE
ANDTANYYCQHSRELPFTFGGGTKVEIKRTSGQVLLESNIKVLPTWSTPVQPMALIVLGGVAGLLLFIGLGIFFRVKESR
SADAPAYKQGQNQLYNELNLGRREEYDVLDKRRGRDPEMGGKPRRKNPQEGLYNELQKDKMAEAYSEIGMKGERRRGKGH
DGLYQGLSTATKDTYDALHMQALPPR**
CAR-T C2 CD4/CD4/CD28/CD3z sequence:
N-CD81s-huMNC2scFv-CD4ecd-CD4 transmembrane-CD28-CD3zeta-C
(DNA)
(SEQ ID NO: 760)
atggccttgccagtgacggccctgctgctgccattggctcttctgttgcacgctgccaggcctgaagtgcagctcgtaga
gagtggcgggggactggtgaagcccggtggaagcctcagactcagttgcgccgcctcaggtttcactttttcaggttacg
ccatgtcctgggtaagacaggcaccggggaaaggactcgagtgggtgtctactatcagctcaggaggcacttatatatat
tatcctgactctgtaaaaggccgatttacgatttctcgcgacaatgcaaagaactccctctacctccaaatgaacagtct
tagggcagaagacactgctgtatactattgtgcacgcctcggcggcgacaactactacgagtactttgacgtgtggggga
aagggactaccgtgacagtttcaagcggaggaggtggctcaggtggaggcgggtcaggggggggaggaagtgatattgtg
ctcacacaatccccagcctccctggctgtgtctcccggccaacgcgctacaattacatgtcgggcctccaaaagcgtgag
caccagcggctacagctacatgcactggtatcaacagaaaccaggacaaccccccaaactgttgatttatctcgcttcaa
acttggagtccggcgtgcctgcgcgcttttcagggagtgggagcggcacagattttacgctgactatcaaccccgtagaa
gcaaacgatacagcgaattattattgtcaacattcccgggaactcccctttacgttcggcgggggcacaaaggtcgaaat
taagagaacctcgggacaggtcctgctggaatccaacatcaaggttctgcccacatggtccaccccggtgcagccaatgg
ccctgattgtgctggggggcgtcgccggcctcctgcttttcattgggctaggcatcttcttcagaagcaagcggtctcgg
ctcctgcattctgattacatgaacatgaccccaagaagaccaggccccaccaggaaacattaccagccctacgctccgcc
acgcgacttcgctgcctaccggtcccgcgttaagttctcccgatcagccgacgcgcctgcttacaagcagggccagaacc
aactgtacaacgagctgaatctcggtagacgggaagagtacgacgtgttggacaaacggagaggccgcgacccagaaatg
ggcggcaagcctcgcaggaaaaacccccaggagggactgtacaatgagttgcagaaagataagatggcagaagcttatag
cgagatcggaatgaagggggaaaggagacgagggaaaggacacgacggcctttatcagggcctgtccacagcaacaaaag
atacgtatgacgccctccatatgcaggcacttccaccacggtgataa
(amino acids)
(SEQ ID NO: 761)
MALPVTALLLPLALLLHAARPEVQLVESGGGLVKPGGSLRLSCAASGFTFSGYAMSWVRQAPGKGLEWVSTISSGGTYIY
YPDSVKGRFTISRDNAKNSLYLQMNSLRAEDTAVYYCARLGGDNYYEYFDVWGKGTTVTVSSGGGGSGGGGSGGGGSDIV
LTQSPASLAVSPGQRATITCRASKSVSTSGYSYMHWYQQKPGQPPKLLIYLASNLESGVPARFSGSGSGTDFTLTINPVE
ANDTANYYCQHSRELPFTFGGGTKVEIKRTSGQVLLESNIKVLPTWSTPVQPMALIVLGGVAGLLLFIGLGIFFRSKRSR
LLHSDYMNMTPRRPGPTRKHYQPYAPPRDFAAYRSRVKFSRSADAPAYKQGQNQLYNELNLGRREEYDVLDKRRGRDPEM
GGKPRRKNPQEGLYNELQKDKMAEAYSEIGMKGERRRGKGHDGLYQGLSTATKDTYDALHMQALPPR**
CAR-T C2 CD4/CD4/4-1BB/CD3z sequence:
N-CD81s-huMNC2scFv-CD4ecd-CD4 transmembrane-4-1BB-CD3zeta-C
(DNA)
(SEQ ID NO: 762)
atggccttgccagtgacggccctgctgctgccattggctcttctgttgcacgctgccaggcctgaagtgcagctcgtagag
agtggcgggggactggtgaagcccggtggaagcctcagactcagttgcgccgcctcaggtttcactttttcaggttacgcc
atgtcctgggtaagacaggcaccggggaaaggactcgagtgggtgtctactatcagctcaggaggcacttatatatattat
cctgactctgtaaaaggccgatttacgatttctcgcgacaatgcaaagaactccctctacctccaaatgaacagtcttagg
gcagaagacactgctgtatactattgtgcacgcctcggcggcgacaactactacgagtactttgacgtgtgggggaaaggg
actaccgtgacagtttcaagcggaggaggtggctcaggtggaggcgggtcaggggggggaggaagtgatattgtgctcaca
caatccccagcctccctggctgtgtctcccggccaacgcgctacaattacatgtcgggcctccaaaagcgtgagcaccagc
ggctacagctacatgcactggtatcaacagaaaccaggacaaccccccaaactgttgatttatctcgcttcaaacttggag
tccggcgtgcctgcgcgcttttcagggagtgggagcggcacagattttacgctgactatcaaccccgtagaagcaaacgat
acagcgaattattattgtcaacattcccgggaactcccctttacgttcggcgggggcacaaaggtcgaaattaagagaacc
tcgggacaggtcctgctggaatccaacatcaaggttctgcccacatggtccaccccggtgcagccaatggccctgattgtg
ctggggggcgtcgccggcctcctgcttttcattgggctaggcatcttcttcaaaaggggccgcaaaaaactcctttacatt
tttaagcagccttttatgaggccagtacagacgactcaagaggaagacgggtgctcatgccgctttcctgaggaggaggaa
ggagggtgcgaactgcgcgttaagttctcccgatcagccgacgcgcctgcttacaagcagggccagaaccaactgtacaac
gagctgaatctcggtagacgggaagagtacgacgtgttggacaaacggagaggccgcgacccagaaatgggcggcaagcct
cgcaggaaaaacccccaggagggactgtacaatgagttgcagaaagataagatggcagaagcttatagcgagatcggaatg
aagggggaaaggagacgagggaaaggacacgacggcctttatcagggcctgtccacagcaacaaaagatacgtatgacgcc
ctccatatgcaggcacttccaccacggtgataa
(amino acids)
(SEQ ID NO: 763)
MALPVTALLLPLALLLHAARPEVQLVESGGGLVKPGGSLRLSCAASGFTFSGYAMSWVRQAPGKGLEWVSTISSGGTYIY
YPDSVKGRFTISRDNAKNSLYLQMNSLRAEDTAVYYCARLGGDNYYEYFDVWGKGTTVTVSSGGGGSGGGGSGGGGSDIV
LTQSPASLAVSPGQRATITCRASKSVSTSGYSYMHWYQQKPGQPPKLLIYLASNLESGVPARFSGSGSGTDFTLTINPVE
ANDTANYYCQHSRELPFTFGGGTKVEIKRTSGQVLLESNIKVLPTWSTPVQPMALIVLGGVAGLLLFIGLGIFFKRGRKK
LLYIFKQPFMRPVQTTQEEDGCSCRFPEEEEGGCELRVKFSRSADAPAYKQGQNQLYNELNLGRREEYDVLDKRRGRDPE
MGGKPRRKNPQEGLYNELQKDKMAEAYSEIGMKGERRRGKGHDGLYQGLSTATKDTYDALHMQALPPR**
CAR-T C2 CD4/CD4/OX40/CD3z sequence:
N-CD81s-huMNC2scFv-CD4ecd-CD4 transmembrane-OX40-CD3zeta-C
(DNA)
(SEQ ID NO: 764)
atggccttgccagtgacggccctgctgctgccattggctcttctgttgcacgctgccaggcctgaagtgcagctcgtaga
gagtggcgggggactggtgaagcccggtggaagcctcagactcagttgcgccgcctcaggtttcactttttcaggttacg
ccatgtcctgggtaagacaggcaccggggaaaggactcgagtgggtgtctactatcagctcaggaggcacttatatatat
tatcctgactctgtaaaaggccgatttacgatttctcgcgacaatgcaaagaactccctctacctccaaatgaacagtct
tagggcagaagacactgctgtatactattgtgcacgcctcggcggcgacaactactacgagtactttgacgtgtggggga
aagggactaccgtgacagtttcaagcggaggaggtggctcaggtggaggcgggtcaggggggggaggaagtgatattgtg
ctcacacaatccccagcctccctggctgtgtctcccggccaacgcgctacaattacatgtcgggcctccaaaagcgtgag
caccagcggctacagctacatgcactggtatcaacagaaaccaggacaaccccccaaactgttgatttatctcgcttcaa
acttggagtccggcgtgcctgcgcgcttttcagggagtgggagcggcacagattttacgctgactatcaaccccgtagaa
gcaaacgatacagcgaattattattgtcaacattcccgggaactcccctttacgttcggcgggggcacaaaggtcgaaat
taagagaacctcgggacaggtcctgctggaatccaacatcaaggttctgcccacatggtccaccccggtgcagccaatgg
ccctgattgtgctggggggcgtcgccggcctcctgcttttcattgggctaggcatcttcttccggagggaccagaggctg
ccccccgatgcccacaagccccctgggggaggcagtttccggacccccatccaagaggagcaggccgacgcccactccac
cctggccaagatccgcgttaagttctcccgatcagccgacgcgcctgcttacaagcagggccagaaccaactgtacaacg
agctgaatctcggtagacgggaagagtacgacgtgttggacaaacggagaggccgcgacccagaaatgggcggcaagcct
cgcaggaaaaacccccaggagggactgtacaatgagttgcagaaagataagatggcagaagcttatagcgagatcggaat
gaagggggaaaggagacgagggaaaggacacgacggcctttatcagggcctgtccacagcaacaaaagatacgtatgacg
ccctccatatgcaggcacttccaccacggtgataa
(amino acids)
(SEQ ID NO: 765)
MALPVTALLLPLALLLHAARPEVQLVESGGGLVKPGGSLRLSCAASGFTFSGYAMSWVRQAPGKGLEWVSTISSGGTYIY
YPDSVKGRFTISRDNAKNSLYLQMNSLRAEDTAVYYCARLGGDNYYEYFDVWGKGTTVTVSSGGGGSGGGGSGGGGSDIV
LTQSPASLAVSPGQRATITCRASKSVSTSGYSYMHWYQQKPGQPPKLLIYLASNLESGVPARFSGSGSGTDFTLTINPVE
ANDTANYYCQHSRELPFTFGGGTKVEIKRTSGQVLLESNIKVLPTWSTPVQPMALIVLGGVAGLLLFIGLGIFFRRDQRL
PPDAHKPPGGGSFRTPIQEEQADAHSTLAKIRVKFSRSADAPAYKQGQNQLYNELNLGRREEYDVLDKRRGRDPEMGGKP
RRKNPQEGLYNELQKDKMAEAYSEIGMKGERRRGKGHDGLYQGLSTATKDTYDALHMQALPPR**
CAR-T C2 CD4/CD4/CD28/4-1BB/CD3z sequence:
N-CD8ls-huMNC2scFv-CD4ecd-CD4 transmembrane-CD28-4-1BB-CD3zeta-C
(DNA)
(SEQ ID NO: 766)
atggccttgccagtgacggccctgctgctgccattggctcttctgttgcacgctgccaggcctgaagtgcagctcgtaga
gagtggcgggggactggtgaagcccggtggaagcctcagactcagttgcgccgcctcaggtttcactttttcaggttacg
ccatgtcctgggtaagacaggcaccggggaaaggactcgagtgggtgtctactatcagctcaggaggcacttatatatat
tatcctgactctgtaaaaggccgatttacgatttctcgcgacaatgcaaagaactccctctacctccaaatgaacagtct
tagggcagaagacactgctgtatactattgtgcacgcctcggcggcgacaactactacgagtactttgacgtgtggggga
aagggactaccgtgacagtttcaagcggaggaggtggctcaggtggaggcgggtcaggggggggaggaagtgatattgtg
ctcacacaatccccagcctccctggctgtgtctcccggccaacgcgctacaattacatgtcgggcctccaaaagcgtgag
caccagcggctacagctacatgcactggtatcaacagaaaccaggacaaccccccaaactgttgatttatctcgcttcaa
acttggagtccggcgtgcctgcgcgcttttcagggagtgggagcggcacagattttacgctgactatcaaccccgtagaa
gcaaacgatacagcgaattattattgtcaacattcccgggaactcccctttacgttcggcgggggcacaaaggtcgaaat
taagagaacctcgggacaggtcctgctggaatccaacatcaaggttctgcccacatggtccaccccggtgcagccaatgg
ccctgattgtgctggggggcgtcgccggcctcctgcttttcattgggctaggcatcttcttcagaagcaagcggtctcgg
ctcctgcattctgattacatgaacatgaccccaagaagaccaggccccaccaggaaacattaccagccctacgctccgcc
acgcgacttcgctgcctaccggtccaaaaggggccgcaaaaaactcctttacatttttaagcagccttttatgaggccag
tacagacgactcaagaggaagacgggtgctcatgccgctttcctgaggaggaggaaggagggtgcgaactgcgcgttaag
ttctcccgatcagccgacgcgcctgcttacaagcagggccagaaccaactgtacaacgagctgaatctcggtagacggga
agagtacgacgtgttggacaaacggagaggccgcgacccagaaatgggcggcaagcctcgcaggaaaaacccccaggagg
gactgtacaatgagttgcagaaagataagatggcagaagcttatagcgagatcggaatgaagggggaaaggagacgaggg
aaaggacacgacggcctttatcagggcctgtccacagcaacaaaagatacgtatgacgccctccatatgcaggcacttcc
accacggtgataa
(amino acids)
(SEQ ID NO: 767)
MALPVTALLLPLALLLHAARPEVQLVESGGGLVKPGGSLRLSCAASGFTFSGYAMSWVRQAPGKGLEWVSTISSGGTYIY
YPDSVKGRFTISRDNAKNSLYLQMNSLRAEDTAVYYCARLGGDNYYEYFDVWGKGTTVTVSSGGGGSGGGGSGGGGSDIV
LTQSPASLAVSPGQRATITCRASKSVSTSGYSYMHWYQQKPGQPPKLLIYLASNLESGVPARFSGSGSGTDFTLTINPVE
ANDTANYYCQHSRELPFTFGGGTKVEIKRTSGQVLLESNIKVLPTWSTPVQPMALIVLGGVAGLLLFIGLGIFFRSKRSR
LLHSDYMNMTPRRPGPTRKHYQPYAPPRDFAAYRSKRGRKKLLYIFKQPFMRPVQTTQEEDGCSCRFPEEEEGGCELRVK
FSRSADAPAYKQGQNQLYNELNLGRREEYDVLDKRRGRDPEMGGKPRRKNPQEGLYNELQKDKMAEAYSEIGMKGERRRG
KGHDGLYQGLSTATKDTYDALHMQALPPR**
CAR-T C2 CD4/CD4/CD28/OX40/CD3z sequence:
N-CD8ls-huMNC2scFv-CD4ecd-CD4 transmembrane-CD28-OX40-CD3zeta-C
(DNA)
(SEQ ID NO: 768)
atggccttgccagtgacggccctgctgctgccattggctcttctgttgcacgctgccaggcctgaagtgcagctcgtaga
gagtggcgggggactggtgaagcccggtggaagcctcagactcagttgcgccgcctcaggtttcactttttcaggttacg
ccatgtcctgggtaagacaggcaccggggaaaggactcgagtgggtgtctactatcagctcaggaggcacttatatatat
tatcctgactctgtaaaaggccgatttacgatttctcgcgacaatgcaaagaactccctctacctccaaatgaacagtct
tagggcagaagacactgctgtatactattgtgcacgcctcggcggcgacaactactacgagtactttgacgtgtggggga
aagggactaccgtgacagtttcaagcggaggaggtggctcaggtggaggcgggtcaggggggggaggaagtgatattgtg
ctcacacaatccccagcctccctggctgtgtctcccggccaacgcgctacaattacatgtcgggcctccaaaagcgtgag
caccagcggctacagctacatgcactggtatcaacagaaaccaggacaaccccccaaactgttgatttatctcgcttcaa
acttggagtccggcgtgcctgcgcgcttttcagggagtgggagcggcacagattttacgctgactatcaaccccgtagaa
gcaaacgatacagcgaattattattgtcaacattcccgggaactcccctttacgttcggcgggggcacaaaggtcgaaat
taagagaacctcgggacaggtcctgctggaatccaacatcaaggttctgcccacatggtccaccccggtgcagccaatgg
ccctgattgtgctggggggcgtcgccggcctcctgcttttcattgggctaggcatcttcttcagaagcaagcggtctcgg
ctcctgcattctgattacatgaacatgaccccaagaagaccaggccccaccaggaaacattaccagccctacgctccgcc
acgcgacttcgctgcctaccggtcccggagggaccagaggctgccccccgatgcccacaagccccctgggggaggcagtt
tccggacccccatccaagaggagcaggccgacgcccactccaccctggccaagatccgcgttaagttctcccgatcagcc
gacgcgcctgcttacaagcagggccagaaccaactgtacaacgagctgaatctcggtagacgggaagagtacgacgtgtt
ggacaaacggagaggccgcgacccagaaatgggcggcaagcctcgcaggaaaaacccccaggagggactgtacaatgagt
tgcagaaagataagatggcagaagcttatagcgagatcggaatgaagggggaaaggagacgagggaaaggacacgacggc
ctttatcagggcctgtccacagcaacaaaagatacgtatgacgccctccatatgcaggcacttccaccacggtgataa
(amino acids)
(SEQ ID NO: 769)
MALPVTALLLPLALLLHAARPEVQLVESGGGLVKPGGSLRLSCAASGFTFSGYAMSWVRQAPGKGLEWVSTISSGGTYIY
YPDSVKGRFTISRDNAKNSLYLQMNSLRAEDTAVYYCARLGGDNYYEYFDVWGKGTTVTVSSGGGGSGGGGSGGGGSDIV
LTQSPASLAVSPGQRATITCRASKSVSTSGYSYMHWYQQKPGQPPKLLIYLASNLESGVPARFSGSGSGTDFTLTINPVE
ANDTANYYCQHSRELPFTFGGGTKVEIKRTSGQVLLESNIKVLPTWSTPVQPMALIVLGGVAGLLLFIGLGIFFRSKRSR
LLHSDYMNMTPRRPGPTRKHYQPYAPPRDFAAYRSRRDORLPPDAHKPPGGGSFRTPIQEEQADAHSTLAKIRVKFSRSA
DAPAYKQGQNQLYNELNLGRREEYDVLDKRRGRDPEMGGKPRRKNPQEGLYNELQKDKMAEAYSEIGMKGERRRGKGHDG
LYQGLSTATKDTYDALHMQALPPR**
CAR-T E6 IgD/FC/CD8/4-1BB/CD3z
N-CD8ls-huMNE6scFv-IgD hinge-Human IgG1 Fc-CD8 transmembrane-4-1BB-CD3zeta-
C
(DNA)
(SEQ ID NO: 770)
atggccctgcccgtgaccgctttgctgctccccctggcgctgctgctgcacgccgccaggccagaggtccagctggttgag
agtggcggtgggctggttaagcctggcggctccctgcggctgagctgcgccgcgagtggatttactttcagccgatatggg
atgagttgggtgcggcaagctcccgggaagaggctggaatgggtctcaacaatctccggggggggcacttacatctattac
cccgactcagtcaaggggagatttaccatttcacgagacaacgctaagaataccctgtatttgcagatgaattctctgaga
gcagaggacacagctgtttactattgtacccgcgacaactatggcaggaactacgactacggtatggactattggggacaa
gggacattggttacagtgagcagtggcggcgggggcagcggaggaggaggcagcggtggcggaggcagcgagatagtgctc
acgcagtcacccgcgactctcagtctctcacctggggaacgagctaccctgacgtgctctgctacctcctcagtgtcatat
attcactggtatcagcaacggcccgggcagtcccctagattgctcatttatagtacctctaatctggcctcaggtatccct
gcacgattttctggatctggttcaggttctgattacaccctcactatctctagcctggagcctgaagactttgccgtttat
tactgccagcagaggtctagctccccattcacctttgggagtgggaccaaggttgaaattaaagagtctccaaaggcacag
gcctcctcagtgcccactgcacaaccccaagcagagggcagcctcgccaaggcaaccacagccccagccaccacccgtaac
acaggaagaggcggcgaagagaagaaaaaggagaaggagaaagaggaacaagaagagagagagacaaagacaccagagccc
aaatcttgtgacaaaactcacacatgcccaccgtgcccagcacctgaactcctggggggaccgtcagtcttcctcttcccc
ccaaaacccaaggacaccctcatgatctcccggacccctgaggtcacatgcgtggtggtggacgtgagccacgaagaccct
gaggtcaagttcaactggtacgtggacggcgtggaggtgcataatgccaagacaaagccgcgggaggagcagtacaacagc
acgtaccgtgtggtcagcgtcctcaccgtcctgcaccaggactggctgaatggcaaggagtacaagtgcaaggtctccaac
aaagccctcccagcccccatcgagaaaaccatctccaaagccaaagggcagccccgagaaccacaggtgtacaccctgccc
ccatcccgggaggagatgaccaagaaccaggtcagcctgacctgcctggtcaaaggcttctatcccagcgacatcgccgtg
gagtgggagagcaatgggcagccggagaacaactacaagaccacgcctcccgtgctggactccgacggctccttcttcctc
tacagcaagctcaccgtggacaagagcaggtggcagcaggggaacgtcttctcatgctccgtgatgcatgaggctctgcac
aaccactacacgcagaagagcctctccctgtctccgggtaaaatctacatctgggcgcccttggccgggacttgtggggtc
cttctcctgtcactggttatcaccctttactgcaaacggggcagaaagaaactcctgtatatattcaaacaaccatttatg
agaccagtacaaactactcaagaggaagatggctgtagctgccgatttccagaagaagaagaaggaggatgtgaactgaga
gtgaagttcagcaggagcgcagacgcccccgcgtacaagcagggccagaaccagctctataacgagctcaatctaggacga
agagaggagtacgatgttttggacaagagacgtggccgggaccctgagatggggggaaagccgagaaggaagaaccctcag
gaaggcctgtacaatgaactgcagaaagataagatggcggaggcctacagtgagattgggatgaaaggcgagcgccggagg
ggcaaggggcacgatggcctttaccagggtctcagtacagccaccaaggacacctacgacgcccttcacatgcaggccctg
ccccctcgctgataa
(amino acids)
(SEQ ID NO: 771)
MALPVTALLLPLALLLHAARPEVQLVESGGGLVKPGGSLRLSCAASGFTFSRYGMSWVRQAPGKRLEWVSTISGGGTYIY
YPDSVKGRFTISRDNAKNTLYLQMNSLRAEDTAVYYCTRDNYGRNYDYGMDYWGQGTLVTVSSGGGGSGGGGSGGGGSEI
VLTQSPATLSLSPGERATLTCSATSSVSYIHWYQQRPGQSPRLLIYSTSNLASGIPARFSGSGSGSDYTLTISSLEPEDF
AVYYCQQRSSSPFTFGSGTKVEIKESPKAQASSVPTAQPQAEGSLAKATTAPATTRNTGRGGEEKKKEKEKEEQEERETK
TPEPKSCDKTHTCPPCPAPELLGGPSVFLFPPKPKDTLMISRTPEVTCVVVDVSHEDPEVKFNWYVDGVEVHNAKTKPRE
EQYNSTYRVVSVLTVLHQDWLNGKEYKCKVSNKALPAPIEKTISKAKGQPREPQVYTLPPSREEMTKNQVSLTCLVKGFY
PSDIAVEWESNGQPENNYKTTPPVLDSDGSFFLYSKLTVDKSRWQQGNVFSCSVMHEALHNHYTQKSLSLSPGKIYIWAP
LAGTCGVLLLSLVITLYCKRGRKKLLYIFKQPFMRPVQTTQEEDGCSCRFPEEEEGGCELRVKFSRSADAPAYKQGQNQL
YNELNLGRREEYDVLDKRRGRDPEMGGKPRRKNPQEGLYNELQKDKMAEAYSEIGMKGERRRGKGHDGLYQGLSTATKDT
YDALHMQALPPR**
CAR-T E6 IgD/FCHingeless Y407R/CD8/4-1BB/CD3z
N-CD8ls-huMNE6scFv-IgD hinge-Human IgG1 hingeless Fc Y407R-CD8
transmembrane-4-1BB-CD3zeta-C
(DNA)
(SEQ ID NO: 772)
atggccctgcccgtgaccgctttgctgctccccctggcgctgctgctgcacgccgccaggccagaggtccagctggttgag
agtggcggtgggctggttaagcctggcggctccctgcggctgagctgcgccgcgagtggatttactttcagccgatatggg
atgagttgggtgcggcaagctcccgggaagaggctggaatgggtctcaacaatctccggggggggcacttacatctattac
cccgactcagtcaaggggagatttaccatttcacgagacaacgctaagaataccctgtatttgcagatgaattctctgaga
gcagaggacacagctgtttactattgtacccgcgacaactatggcaggaactacgactacggtatggactattggggacaa
gggacattggttacagtgagcagtggcggcgggggcagcggaggaggaggcagcggtggcggaggcagcgagatagtgctc
acgcagtcacccgcgactctcagtctctcacctggggaacgagctaccctgacgtgctctgctacctcctcagtgtcatat
attcactggtatcagcaacggcccgggcagtcccctagattgctcatttatagtacctctaatctggcctcaggtatccct
gcacgattttctggatctggttcaggttctgattacaccctcactatctctagcctggagcctgaagactttgccgtttat
tactgccagcagaggtctagctccccattcacctttgggagtgggaccaaggttgaaattaaagagtctccaaaggcacag
gcctcctcagtgcccactgcacaaccccaagcagagggcagcctcgccaaggcaaccacagccccagccaccacccgtaac
acaggaagaggcggcgaagagaagaaaaaggagaaggagaaagaggaacaagaagagagagagacaaagacaccagcacct
gaactcctggggggaccgtcagtcttcctcttccccccaaaacccaaggacaccctcatgatctcccggacccctgaggtc
acatgcgtggtggtggacgtgagccacgaagaccctgaggtcaagttcaactggtacgtggacggcgtggaggtgcataat
gccaagacaaagccgcgggaggagcagtacaacagcacgtaccgtgtggtcagcgtcctcaccgtcctgcaccaggactgg
ctgaatggcaaggagtacaagtgcaaggtctccaacaaagccctcccagcccccatcgagaaaaccatctccaaagccaaa
gggcagccccgagaaccacaggtgtacaccctgcccccatcccgggaggagatgaccaagaaccaggtcagcctgacctgc
ctggtcaaaggcttctatcccagcgacatcgccgtggagtgggagagcaatgggcagccggagaacaactacaagaccacg
cctcccgtgctggactccgacggctccttcttcctcaggagcaagctcaccgtggacaagagcaggtggcagcaggggaac
gtcttctcatgctccgtgatgcatgaggctctgcacaaccactacacgcagaagagcctctccctgtctccgggtaaaatc
tacatctgggcgcccttggccgggacttgtggggtccttctcctgtcactggttatcaccctttactgcaaacggggcaga
aagaaactcctgtatatattcaaacaaccatttatgagaccagtacaaactactcaagaggaagatggctgtagctgccga
tttccagaagaagaagaaggaggatgtgaactgagagtgaagttcagcaggagcgcagacgcccccgcgtacaagcagggc
cagaaccagctctataacgagctcaatctaggacgaagagaggagtacgatgttttggacaagagacgtggccgggaccct
gagatggggggaaagccgagaaggaagaaccctcaggaaggcctgtacaatgaactgcagaaagataagatggcggaggcc
tacagtgagattgggatgaaaggcgagcgccggaggggcaaggggcacgatggcctttaccagggtctcagtacagccacc
aaggacacctacgacgcccttcacatgcaggccctgccccctcgctgataa
(amino acids)
(SEQ ID NO: 773)
MALPVTALLLPLALLLHAARPEVQLVESGGGLVKPGGSLRLSCAASGFTFSRYGMSWVRQAPGKRLEWVSTISGGGTYIY
YPDSVKGRFTISRDNAKNTLYLQMNSLRAEDTAVYYCTRDNYGRNYDYGMDYWGQGTLVTVSSGGGGSGGGGSGGGGSEI
VLTQSPATLSLSPGERATLTCSATSSVSYIHWYQQRPGQSPRLLIYSTSNLASGIPARFSGSGSGSDYTLTISSLEPEDF
AVYYCQQRSSSPFTFGSGTKVEIKESPKAQASSVPTAQPQAEGSLAKATTAPATTRNTGRGGEEKKKEKEKEEQEERETK
TPAPELLGGPSVFLFPPKPKDTLMISRTPEVTCVVVDVSHEDPEVKFNWYVDGVEVHNAKTKPREEQYNSTYRVVSVLTV
LHQDWLNGKEYKCKVSNKALPAPIEKTISKAKGQPREPQVYTLPPSREEMTKNQVSLTCLVKGFYPSDIAVEWESNGQPE
NNYKTTPPVLDSDGSFFLRSKLTVDKSRWQQGNVFSCSVMHEALHNHYTQKSLSLSPGKIYIWAPLAGTCGVLLLSLVIT
LYCKRGRKKLLYIFKQPFMRPVQTTQEEDGCSCRFPEEEEGGCELRVKFSRSADAPAYKQGQNQLYNELNLGRREEYDVL
DKRRGRDPEMGGKPRRKNPQEGLYNELQKDKMAEAYSEIGMKGERRRGKGHDGLYQGLSTATKDTYDALHMQALPPR**
NFATc1P2-MMP9
(DNA)
(SEQ ID NO: 774)
caggcctggggacactcgcggcgggaagatttggaggggaggggagggggaggggcgtgggggcgcggcctcgctggagt
ccccctgaccccccgacccccgcccaccggcctgggcgtcctcccgcggcccctcctcccctcccggcgcccggtgctct
ggggcgcgtgccacgcctggctcggcgccgtaggggcccccgcaggtagagacccctggaaatggcctcgacgccgcagg
agcgaggcggccaccaccccgctaatccgggcacgtctctccaggccgaggcctgcggtggaaaagccggggttccattt
gtgctgagtcggggcggccgaatggagccaggcctcgggacgcgggacggacgggctctggccgcgcaccttcgcgggct
ctgcagcgcccgaccgcctcccccggcagggaggaggcgcttgtggggggcacccacggggcacagtgatccctgggggt
ctgcggacctcctgggccccgcagcagacacgagtttagcctttgggtttagtttaaatcacataagggtgtcgtgcaat
cgatttatggtttctacacaccagacactttaacctccaaccccccccatccaaagccaacaagaaaatgcggtgccgtg
ttggcagctgagctgcgcccgaagagacgcagggagacgtaagagaggaaagtgtgagtggccggggggcctccccccgt
cagaagtcgcgcagtcgcgcccataaaacgccccctccgggcggctagggcaggtgagcgcgtccccgggcctccccacg
ccggcccctgccacaggccgtctaggtcgagcagatatttacagaataaaaatgacaataactcgacgtcccgggacggc
cacgcaatctgttagtaatttagcgggatgggaatttcctttctagggcctgccagtgaagcgcttttccaaatttccac
agcgggggaagcctgcgattttacataatgacttcagcatgccgggctttctcgacacccctccccggcccccggccccc
gccccccgccccttttccagcagggccgggctccctccggacacccgcgtggactcaggcgtcccgtctggcccgttcgc
ccccgtttcccccgccagccccagcgcccccctgcccggcccccggattccccgttcccgcccctacgcccccatcccct
ccccgtgcgcccctccccgtgcgcccccctccccgtgcgccccccctccccgtgcgcccccctccccgtgcgccccccct
ccccgggcgcccccctccccgggcgccccccctccccgtgcgcccccccctccccgtgcgccccccctccccgtgcgcgc
cccgcctcttgcgcccctgcccccaggcgagcggctgccgcggcgcggggaggggcgggcgctcggcgactcgtccccgg
ggccccgcgcgggcccgggcagcaggggcgtgatgtcacggcagggagggggcgcgggagccgccgggccggcggggagg
cgggggaggtgttttccagctttaaaaaggcaggaggcagagcgcggccctgcgtcagagcgagactcagaggctccgaa
ctcgccggcggagtcgccgcgccagatcccagcagcagggcgcggaagcttctctcgacattcgtttctagagccaccat
gagcctctggcagcccctggtcctggtgctcctggtgctgggctgctgctttgctgcccccagacagcgccagtccaccct
tgtgctcttccctggagacctgagaaccaatctcaccgacaggcagctggcagaggaatacctgtaccgctatggttacac
tcgggtggcagagatgcgtggagagtcgaaatctctggggcctgcgctgctgcttctccagaagcaactgtccctgcccga
gaccggtgagctggatagcgccacgctgaaggccatgcgaaccccacggtgcggggtcccagacctgggcagattccaaac
ctttgagggcgacctcaagtggcaccaccacaacatcacctattggatccaaaactactcggaagacttgccgcgggcggt
gattgacgacgcctttgcccgcgccttcgcactgtggagcgcggtgacgccgctcaccttcactcgcgtgtacagccggga
cgcagacatcgtcatccagtttggtgtcgcggagcacggagacgggtatcccttcgacgggaaggacgggctcctggcaca
cgcctttcctcctggccccggcattcagggagacgcccatttcgacgatgacgagttgtggtccctgggcaagggcgtcgt
ggttccaactcggtttggaaacgcagatggcgcggcctgccacttccccttcatcttcgagggccgctcctactctgcctg
caccaccgacggtcgctccgacggcttgccctggtgcagtaccacggccaactacgacaccgacgaccggtttggcttctg
ccccagcgagagactctacacccaggacggcaatgctgatgggaaaccctgccagtttccattcatcttccaaggccaatc
ctactccgcctgcaccacggacggtcgctccgacggctaccgctggtgcgccaccaccgccaactacgaccgggacaagct
cttcggcttctgcccgacccgagctgactcgacggtgatggggggcaactcggcgggggagctgtgcgtcttccccttcac
tttcctgggtaaggagtactcgacctgtaccagcgagggccgcggagatgggcgcctctggtgcgctaccacctcgaactt
tgacagcgacaagaagtggggcttctgcccggaccaaggatacagtttgttcctcgtggcggcgcatgagttcggccacgc
gctgggcttagatcattcctcagtgccggaggcgctcatgtaccctatgtaccgcttcactgaggggccccccttgcataa
ggacgacgtgaatggcatccggcacctctatggtcctcgccctgaacctgagccacggcctccaaccaccaccacaccgca
gcccacggctcccccgacggtctgccccaccggaccccccactgtccacccctcagagcgccccacagctggccccacagg
tcccccctcagctggccccacaggtccccccactgctggcccttctacggccactactgtgcctttgagtccggtggacga
tgcctgcaacgtgaacatcttcgacgccatcgcggagattgggaaccagctgtatttgttcaaggatgggaagtactggcg
attctctgagggcagggggagccggccgcagggccccttccttatcgccgacaagtggcccgcgctgccccgcaagctgga
ctcggtctttgaggagcggctctccaagaagcttttcttcttctctgggcgccaggtgtgggtgtacacaggcgcgtcggt
gctgggcccgaggcgtctggacaagctgggcctgggagccgacgtggcccaggtgaccggggccctccggagtggcagggg
gaagatgctgctgttcagcgggcggcgcctctggaggttcgacgtgaaggcgcagatggtggatccccggagcgccagcga
ggtggaccggatgttccccggggtgcctttggacacgcacgacgtcttccagtaccgagagaaagcctatttctgccagga
ccgcttctactggcgcgtgagttcccggagtgagttgaaccaggtggaccaagtgggctacgtgacctatgacatcctgca
gtgccctgaggacgattacaaggatgacgacgataagtgataa
NFATc1P2-MMP9cat
(DNA)
(SEQ ID NO: 775)
caggcctggggacactcgcggcgggaagatttggaggggaggggagggggaggggcgtgggggcgcggcctcgctggagt
ccccctgaccccccgacccccgcccaccggcctgggcgtcctcccgcggcccctcctcccctcccggcgcccggtgctct
ggggcgcgtgccacgcctggctcggcgccgtaggggcccccgcaggtagagacccctggaaatggcctcgacgccgcagg
agcgaggcggccaccaccccgctaatccgggcacgtctctccaggccgaggcctgcggtggaaaagccggggttccattt
gtgctgagtcggggcggccgaatggagccaggcctcgggacgcgggacggacgggctctggccgcgcaccttcgcgggct
ctgcagcgcccgaccgcctcccccggcagggaggaggcgcttgtggggggcacccacggggcacagtgatccctgggggt
ctgcggacctcctgggccccgcagcagacacgagtttagcctttgggtttagtttaaatcacataagggtgtcgtgcaat
cgatttatggtttctacacaccagacactttaacctccaaccccccccatccaaagccaacaagaaaatgcggtgccgtg
ttggcagctgagctgcgcccgaagagacgcagggagacgtaagagaggaaagtgtgagtggccggggggcctccccccgt
cagaagtcgcgcagtcgcgcccataaaacgccccctccgggcggctagggcaggtgagcgcgtccccgggcctccccacg
ccggcccctgccacaggccgtctaggtcgagcagatatttacagaataaaaatgacaataactcgacgtcccgggacggc
cacgcaatctgttagtaatttagcgggatgggaatttcctttctagggcctgccagtgaagcgcttttccaaatttccac
agcgggggaagcctgcgattttacataatgacttcagcatgccgggctttctcgacacccctccccggcccccggccccc
gccccccgccccttttccagcagggccgggctccctccggacacccgcgtggactcaggcgtcccgtctggcccgttcgc
ccccgtttcccccgccagccccagcgcccccctgcccggcccccggattccccgttcccgcccctacgcccccatcccct
ccccgtgcgcccctccccgtgcgcccccctccccgtgcgccccccctccccgtgcgcccccctccccgtgcgccccccct
ccccgggcgcccccctccccgggcgccccccctccccgtgcgcccccccctccccgtgcgccccccctccccgtgcgcgc
cccgcctcttgcgcccctgcccccaggcgagcggctgccgcggcgcggggaggggcgggcgctcggcgactcgtccccgg
ggccccgcgcgggcccgggcagcaggggcgtgatgtcacggcagggagggggcgcgggagccgccgggccggcggggagg
cgggggaggtgttttccagctttaaaaaggcaggaggcagagcgcggccctgcgtcagagcgagactcagaggctccgaa
ctcgccggcggagtcgccgcgccagatcccagcagcagggcgcggaagcttctctcgacattcgtttctagagccaccat
gagcctctggcagcccctggtcctggtgctcctggtgctgggctgctgctttgctttccaaacctttgagggcgacctcaa
gtggcaccaccacaacatcacctattggatccaaaactactcggaagacttgccgcgggcggtgattgacgacgcctttgc
ccgcgccttcgcactgtggagcgcggtgacgccgctcaccttcactcgcgtgtacagccgggacgcagacatcgtcatcca
gtttggtgtcgcggagcacggagacgggtatcccttcgacgggaaggacgggctcctggcacacgcctttcctcctggccc
cggcattcagggagacgcccatttcgacgatgacgagttgtggtccctgggcaagggcgtcgtggttccaactcggtttgg
aaacgcagatggcgcggcctgccacttccccttcatcttcgagggccgctcctactctgcctgcaccaccgacggtcgctc
cgacggcttgccctggtgcagtaccacggccaactacgacaccgacgaccggtttggcttctgccccagcgagagactcta
cacccaggacggcaatgctgatgggaaaccctgccagtttccattcatcttccaaggccaatcctactccgcctgcaccac
ggacggtcgctccgacggctaccgctggtgcgccaccaccgccaactacgaccgggacaagctcttcggcttctgcccgac
ccgagctgactcgacggtgatggggggcaactcggcgggggagctgtgcgtcttccccttcactttcctgggtaaggagta
ctcgacctgtaccagcgagggccgcggagatgggcgcctctggtgcgctaccacctcgaactttgacagcgacaagaagtg
gggcttctgcccggaccaaggatacagtttgttcctcgtggcggcgcatgagttcggccacgcgctgggcttagatcattc
ctcagtgccggaggcgctcatgtaccctatgtaccgcttcactgaggggccccccttgcataaggacgacgtgaatggcat
ccggcacctctatggtcctcgccctgaacctgattacaaggatgacgacgataagtgataa
NEAT response element 2
(DNA)
(SEQ ID NO: 776)
aagaggaaaatttgtttcatacagaaggcgtt
NFAT response element 2 repeats
(DNA)
(SEQ ID NO: 777)
aagaggaaaatttgtttcatacagaaggcgttaagaggaaaatttgtttcatacagaaggcgttaagaggaaaatttgttt
catacagaaggcgttaagaggaaaatttgtttcatacagaaggcgtt
CMV minimal promoter 2
(DNA)
(SEQ ID NO: 778)
taggcgtgtacggtgggaggcctatataagcagagctcgtttagtgaaccgtcagatcgcctggagacgccatccacgctg
ttttgacctccatagaagacaccgggaccgatccagc
NFATRE2mCMV2-MMP9
(DNA)
(SEQ ID NO: 779)
aagaggaaaatttgtttcatacagaaggcgttaagaggaaaatttgtttcatacagaaggcgttaagaggaaaatttgttt
catacagaaggcgttaagaggaaaatttgtttcatacagaaggcgttactagttaggcgtgtacggtgggaggcctatata
agcagagctcgtttagtgaaccgtcagatcgcctggagacgccatccacgctgttttgacctccatagaagacaccgggac
cgatccagcctctcgacattcgtttctagagccaccatgagcctctggcagcccctggtcctggtgctcctggtgctgggc
tgctgctttgctgcccccagacagcgccagtccacccttgtgctcttccctggagacctgagaaccaatctcaccgacagg
cagctggcagaggaatacctgtaccgctatggttacactcgggtggcagagatgcgtggagagtcgaaatctctggggcct
gcgctgctgcttctccagaagcaactgtccctgcccgagaccggtgagctggatagcgccacgctgaaggccatgcgaacc
ccacggtgcggggtcccagacctgggcagattccaaacctttgagggcgacctcaagtggcaccaccacaacatcacctat
tggatccaaaactactcggaagacttgccgcgggcggtgattgacgacgcctttgcccgcgccttcgcactgtggagcgcg
gtgacgccgctcaccttcactcgcgtgtacagccgggacgcagacatcgtcatccagtttggtgtcgcggagcacggagac
gggtatcccttcgacgggaaggacgggctcctggcacacgcctttcctcctggccccggcattcagggagacgcccatttc
gacgatgacgagttgtggtccctgggcaagggcgtcgtggttccaactcggtttggaaacgcagatggcgcggcctgccac
ttccccttcatcttcgagggccgctcctactctgcctgcaccaccgacggtcgctccgacggcttgccctggtgcagtacc
acggccaactacgacaccgacgaccggtttggcttctgccccagcgagagactctacacccaggacggcaatgctgatggg
aaaccctgccagtttccattcatcttccaaggccaatcctactccgcctgcaccacggacggtcgctccgacggctaccgc
tggtgcgccaccaccgccaactacgaccgggacaagctcttcggcttctgcccgacccgagctgactcgacggtgatgggg
ggcaactcggcgggggagctgtgcgtcttccccttcactttcctgggtaaggagtactcgacctgtaccagcgagggccgc
ggagatgggcgcctctggtgcgctaccacctcgaactttgacagcgacaagaagtggggcttctgcccggaccaaggatac
agtttgttcctcgtggcggcgcatgagttcggccacgcgctgggcttagatcattcctcagtgccggaggcgctcatgtac
cctatgtaccgcttcactgaggggccccccttgcataaggacgacgtgaatggcatccggcacctctatggtcctcgccct
gaacctgagccacggcctccaaccaccaccacaccgcagcccacggctcccccgacggtctgccccaccggaccccccact
gtccacccctcagagcgccccacagctggccccacaggtcccccctcagctggccccacaggtccccccactgctggccct
tctacggccactactgtgcctttgagtccggtggacgatgcctgcaacgtgaacatcttcgacgccatcgcggagattggg
aaccagctgtatttgttcaaggatgggaagtactggcgattctctgagggcagggggagccggccgcagggccccttcctt
atcgccgacaagtggcccgcgctgccccgcaagctggactcggtctttgaggagcggctctccaagaagcttttcttcttc
tctgggcgccaggtgtgggtgtacacaggcgcgtcggtgctgggcccgaggcgtctggacaagctgggcctgggagccgac
gtggcccaggtgaccggggccctccggagtggcagggggaagatgctgctgttcagcgggcggcgcctctggaggttcgac
gtgaaggcgcagatggtggatccccggagcgccagcgaggtggaccggatgttccccggggtgcctttggacacgcacgac
gtcttccagtaccgagagaaagcctatttctgccaggaccgcttctactggcgcgtgagttcccggagtgagttgaaccag
gtggaccaagtgggctacgtgacctatgacatcctgcagtgccctgaggacgattacaaggatgacgacgataagtgataa
NFATRE2mCMV2-MMP9cat
(DNA)
(SEQ ID NO: 780)
aagaggaaaatttgtttcatacagaaggcgttaagaggaaaatttgtttcatacagaaggcgttaagaggaaaatttgttt
catacagaaggcgttaagaggaaaatttgtttcatacagaaggcgttactagttaggcgtgtacggtgggaggcctatata
agcagagctcgtttagtgaaccgtcagatcgcctggagacgccatccacgctgttttgacctccatagaagacaccgggac
cgatccagcctcgagctctcgacattcgtttctagagccaccatgagcctctggcagcccctggtcctggtgctcctggtg
ctgggctgctgctttgctttccaaacctttgagggcgacctcaagtggcaccaccacaacatcacctattggatccaaaac
tactcggaagacttgccgcgggcggtgattgacgacgcctttgcccgcgccttcgcactgtggagcgcggtgacgccgctc
accttcactcgcgtgtacagccgggacgcagacatcgtcatccagtttggtgtcgcggagcacggagacgggtatcccttc
gacgggaaggacgggctcctggcacacgcctttcctcctggccccggcattcagggagacgcccatttcgacgatgacgag
ttgtggtccctgggcaagggcgtcgtggttccaactcggtttggaaacgcagatggcgcggcctgccacttccccttcatc
ttcgagggccgctcctactctgcctgcaccaccgacggtcgctccgacggcttgccctggtgcagtaccacggccaactac
gacaccgacgaccggtttggcttctgccccagcgagagactctacacccaggacggcaatgctgatgggaaaccctgccag
tttccattcatcttccaaggccaatcctactccgcctgcaccacggacggtcgctccgacggctaccgctggtgcgccacc
accgccaactacgaccgggacaagctcttcggcttctgcccgacccgagctgactcgacggtgatggggggcaactcggcg
ggggagctgtgcgtcttccccttcactttcctgggtaaggagtactcgacctgtaccagcgagggccgcggagatgggcgc
ctctggtgcgctaccacctcgaactttgacagcgacaagaagtggggcttctgcccggaccaaggatacagtttgttcctc
gtggcggcgcatgagttcggccacgcgctgggcttagatcattcctcagtgccggaggcgctcatgtaccctatgtaccgc
ttcactgaggggccccccttgcataaggacgacgtgaatggcatccggcacctctatggtcctcgccctgaacctgattac
aaggatgacgacgataagtgataa
NFATc1 Promoter fragment (P1)
(DNA)
(SEQ ID NO: 781)
aggcaggaggaagaggaaaggggcgcagggcgctcggggagcagagccgggggcccgcggtggccgcagaggccgggccgg
ggcgcagaggccgggcgagctggccgcgctctgggccgccgcctccggaactccctgcgcctggcgcgcggccaccgtgg
tcccggcaacggcattaaacagagggaaacagacccgggattccgtcacccgggcggggggataaggacggctttgagag
cagacaggaaaagggagcttttctgcatggggtgaaaaaattatttattgaaggaggaggaggcggcagcggaggaaggg
gaggggcgggaggaggaggaagagccggccgcccccgccccggccccggctcctcaggagccaagggcagcctcgccagg
tcggtcccgggctcgaggaccgcggctggggtcgaggggctcagtctcccacgtgaccggctgggcgcgccccgccagac
ccggcctcgggattccctcctcccggcgagtctccgcccgccccgtcctggaggtggggagaaggagggcggggcggggg
ggacggaaactctccccgccaaatcctggccccaggcctggggacactcgcggcgggaagatttggaggggaggggaggg
ggaggggcgtgggggcgcggcctcgctggagtccccctgaccccccgacccccgcccaccggcctgggcgtcctcccgcg
gcccctcctcccctcccggcgcccggtgctctggggcgcgtgccacgcctggctcggcgccgtaggggcccccgcaggta
gagacccctggaaatggcctcgacgccgcaggagcgaggcggccaccaccccgctaatccgggcacgtctctccaggccg
aggcctgcggtggaaaagccggggttccatttgtgctgagtcggggcggccgaatggagccaggcctcgggacgcgggac
ggacgggctctggccgcgcaccttcgcgggctctgcagcgcccgaccgcctcccccggcagggaggaggcgcttgtgggg
ggcacccacggggcacagtgatccctgggggtctgcggacctcctgggccccgcagcagacacgagtttagcctttgggt
ttagtttaaatcacataagggtgtcgtgcaatcgatttatggtttctacacaccagacactttaacctccaacccccccc
atccaagccaacaagaaaatgcggtgccgtgttggcagctgagctgcgcccgaagagacgcagggagacgtaagagagga
aagtgtgagtggccggggggcctccccccgtcagaagtcgcgcagtcgcgcccataaaacgccccctccgggcggctagg
gcaggtgagcgcgtccccgggcctccccacgccggcccctgccacagagccgtctaggtcgagcagatatttacagaata
aaaatgacaataactcgacgtcccgggacggccacgcaatctgttagtaatttagcgggatgggaatttcctttctaggg
cctgccagtgaagcgcttttccaaatttccacagcgggggaagcctgcgattttacataatgacttcagcatgccgggct
ttctcgacacccctccccggcccccggcccccgccccccgccccttttccagcagggccgggctccctccggacacccgc
gtggactcaggcgtcccgtctggcccgttcgcccccgtttcccccgccagccccagcgcccccctgcccggcccccggat
tccccgttcccgcccctacgcccccatcccctccccgtgcgcccctccccgtgcgcccccctccccgtgcgccccccctc
cccgtgcgcccccctccccgtgcgccccccctccccgggcgcccccctccccgggcgccccccctccccgtgcgcccccc
cctccccgtgcgccccccctccccgtgcgcgccccgcctcttgcgcccctgcccccaggcgagcggctgccgcggcgcgg
ggaggggcgggcgctcggcgactcgtccccggggccccgcgcgggcccgggcagcaggggcgtgatgtcacggcagggag
ggggcgcgggagccgccgggccggcggggaggcgggggaggtgttttccagctttaaaaaggcaggaggcagagcgcggc
cctgcgtcagagcgagactcagaggctccgaactcgccggcggagtcgccgcgccagatcccagcagcagggcgcgg
NFATcl Promoter fragment (P2)
(DNA)
(SEQ ID NO: 782)
aggcaggaggaagaggaaaggggcgcagggcgctcggggagcagagccgggggcccgcggtggccgcagaggccgggccgg
ggcgcagaggccgggcgagctggccgcgctctgggccgccgcctccggaactccctgcgcctggcgcgcggccaccgtgg
tcccggcaacggcattaaacagagggaaacagacccgggattccgtcacccgggcggggggataaggacggctttgagag
cagacaggaaaagggagcttttctgcatggggtgaaaaaattatttattgaaggaggaggaggcggcagcggaggaaggg
gaggggcgggaggaggaggaagagccggccgcccccgccccggccccggctcctcaggagccaagggcagcctcgccagg
tcggtcccgggctcgaggaccgcggctggggtcgaggggctcagtctcccacgtgaccggctgggcgcgccccgccagac
ccggcctcgggattccctcctcccggcgagtctccgcccgccccgtcctggaggtggggagaaggagggcggggcggggg
ggacggaaactctccccgccaaatcctggccccaggcctggggacactcgcggcgggaagatttggaggggaggggaggg
ggaggggcgtgggggcgcggcctcgctggagtccccctgaccccccgacccccgcccaccggcctgggcgtcctcccgcg
gcccctcctcccctcccggcgcccggtgctctggggcgcgtgccacgcctggctcggcgccgtaggggcccccgcaggta
gagacccctggaaatggcctcgacgccgcaggagcgaggcggccaccaccccgctaatccgggcacgtctctccaggccg
aggcctgcggtggaaaagccggggttccatttgtgctgagtcggggcggccgaatggagccaggcctcgggacgcgggac
ggacgggctctggccgcgcaccttcgcgggctctgcagcgcccgaccgcctcccccggcagggaggaggcgcttgtgggg
ggcacccacggggcacagtgatccctgggggtctgcggacctcctgggccccgcagcagacacgagtttagcctttgggt
ttagtttaaatcacataagggtgtcgtgcaatcgatttatggtttctacacaccagacactttaacctccaacccccccc
atccaagccaacaagaaaatgcggtgccgtgttggcagctgagctgcgcccgaagagacgcagggagacgtaagagagga
aagtgtgagtggccggggggcctccccccgtcagaagtcgcgcagtcgcgcccataaaacgccccctccgggcggctagg
gcaggtgagcgcgtccccgggcctccccacgccggcccctgccacagagccgtctaggtcgagcagatatttacagaata
aaaatgacaataactcgacgtcccgggacggccacgcaatctgttagtaatttagcgggatgggaatttcctttctaggg
cctgccagtgaagcgcttttccaaatttccacagcgggggaagcctgcgattttacataatgacttcagcatgccgggct
ttctcgacacccctccccggcccccggcccccgccccccgccccttttccagcagggccgggctccctccggacacccgc
gtggactcaggcgtcccgtctggcccgttcgcccccgtttcccccgccagccccagcgcccccctgcccggcccccggat
tccccgttcccgcccctacgcccccatcccctccccgtgcgcccctccccgtgcgcccccctccccgtgcgccccccctc
cccgtgcgcccccctccccgtgcgccccccctccccgggcgcccccctccccgggcgccccccctccccgtgcgcccccc
cctccccgtgcgccccccctccccgtgcgcgccccgcctcttgcgcccctgcccccaggcgagcggctgccgcggcgcgg
ggaggggcgggcgctcggcgactcgtccccggggccccgcgcgggcccgggcagcaggggcgtgatgtcacggcagggag
ggggcgcgggagccgccgggccggcggggaggcgggggaggtgttttccagctttaaaaaggcaggaggcagagcgcggc
cctgcgtcagagcgagactcagagg
NFATc1 Promoter fragment (P3)
(DNA)
(SEQ ID NO: 783)
caggcctggggacactcgcggcgggaagatttggaggggaggggagggggaggggcgtgggggcgcggcctcgctggagt
ccccctgaccccccgacccccgcccaccggcctgggcgtcctcccgcggcccctcctcccctcccggcgcccggtgctct
ggggcgcgtgccacgcctggctcggcgccgtaggggcccccgcaggtagagacccctggaaatggcctcgacgccgcagg
agcgaggcggccaccaccccgctaatccgggcacgtctctccaggccgaggcctgcggtggaaaagccggggttccattt
gtgctgagtcggggcggccgaatggagccaggcctcgggacgcgggacggacgggctctggccgcgcaccttcgcgggct
ctgcagcgcccgaccgcctcccccggcagggaggaggcgcttgtggggggcacccacggggcacagtgatccctgggggt
ctgcggacctcctgggccccgcagcagacacgagtttagcctttgggtttagtttaaatcacataagggtgtcgtgcaat
cgatttatggtttctacacaccagacactttaacctccaaccccccccatccaaagccaacaagaaaatgcggtgccgtg
ttggcagctgagctgcgcccgaagagacgcagggagacgtaagagaggaaagtgtgagtggccggggggcctccccccgt
cagaagtcgcgcagtcgcgcccataaaacgccccctccgggcggctagggcaggtgagcgcgtccccgggcctccccacg
ccggcccctgccacaggccgtctaggtcgagcagatatttacagaataaaaatgacaataactcgacgtcccgggacggc
cacgcaatctgttagtaatttagcgggatgggaatttcctttctagggcctgccagtgaagcgcttttccaaatttccac
agcgggggaagcctgcgattttacataatgacttcagcatgccgggctttctcgacacccctccccggcccccggccccc
gccccccgccccttttccagcagggccgggctccctccggacacccgcgtggactcaggcgtcccgtctggcccgttcgc
ccccgtttcccccgccagccccagcgcccccctgcccggcccccggattccccgttcccgcccctacgcccccatcccct
ccccgtgcgcccctccccgtgcgcccccctccccgtgcgccccccctccccgtgcgcccccctccccgtgcgccccccct
ccccgggcgcccccctccccgggcgccccccctccccgtgcgcccccccctccccgtgcgccccccctccccgtgcgcgc
cccgcctcttgcgcccctgcccccaggcgagcggctgccgcggcgcggggaggggcgggcgctcggcgactcgtccccgg
ggccccgcgcgggcccgggcagcaggggcgtgatgtcacggcagggagggggcgcgggagccgccgggccggcggggagg
cgggggaggtgttttccagctttaaaaaggcaggaggcagagcgcggccctgcgtcagagcgagactcagaggctccgaa
ctcgccggcggagtcgccgcgccagatcccagcagcagggcgcgg
pNFAT-MMP9cat-1 gBLOCK sequence
(DNA)
(SEQ ID NO: 784)
aagaggaaaatttgtttcatacagaaggcgttactagttaggcgtgtacggtgggaggcctatataagcagagctcgttta
gtgaaccgtcagatcgcctggagacgccatccacgctgttttgacctccatagaagacaccgggaccgatccagcctctcg
acattcgtttctagagccaccatgagcctctggcagcccctggtcctggtgctcctggtgctgggctgctgctttgctttc
caaacctttgagggcgacctcaagtggcaccaccacaacatcacctattggatccaaaactactcggaagacttgccgcgg
gcggtgattgacgacgcctttgcccgcgccttcgcactgtggagcgcggtgacgccgctcaccttcactcgcgtgtacagc
cgggacgcagacatcgtcatccagtttggtgtcgcggagcacggagacgggtatcccttcgacgggaaggacgggctcctg
gcacacgcctttcctcctggccccggcattcagggagacgcccatttcgacgatgacgagttgtggtccctgggcaagggc
gtcgtggttccaactcggtttggaaacgcagatggcgcggcctgccacttccccttcatcttcgagggccgctcctactct
gcctgcaccaccgacggtcgctccgacggcttgccctggtgcagtaccacggccaactacgacaccgacgaccggtttggc
ttctgccccagcgagagactctacacccaggacggcaatgctgatgggaaaccctgccagtttccattcatcttccaaggc
caatcctactccgcctgcaccacggacggtcgctccgacggctaccgctggtgcgccaccaccgccaactacgaccgggac
aagctcttcggcttctgcccgacccgagctgactcg
pNFAT-MMP9cat-2 gBLOCK sequence:
(DNA)
(SEQ ID NO: 785)
ttcggcttctgcccgacccgagctgactcgacggtgatggggggcaactcggcgggggagctgtgcgtcttccccttcact
ttcctgggtaaggagtactcgacctgtaccagcgagggccgcggagatgggcgcctctggtgcgctaccacctcgaacttt
gacagcgacaagaagtggggcttctgcccggaccaaggatacagtttgttcctcgtggcggcgcatgagttcggccacgcg
ctgggcttagatcattcctcagtgccggaggcgctcatgtaccctatgtaccgcttcactgaggggccccccttgcataag
gacgacgtgaatggcatccggcacctctatggtcctcgccctgaacctgattacaaggatgacgacgataagtgataagct
agctcgactcgacaatcaacctctggattacaaaatttgtgaaagattgactggtattcttaactatgttgctccttttac
gctatgtggatacgctgctttaatgcctttgtatcatgctattgcttcccgtatggctttcattttctcctccttgtataa
atcctggttgctgtctctttatgaggagttgtggcccgttgtcaggcaacgtggcgtggtgtgcactgtgtttgctgacgc
aacccccactggttggggcattgccaccacctgtcagctcctttccgggactttcgctttccccctccctattgccacggc
ggaactcatcgccgcctgccttgcccgctgctggacaggggctcggctgttgggcactgacaattccgtggtgttgtcggg
gaaatcatcgtcctttccttggctgctcgcctgtgttgccacctggattctgcgcgggacgtccttctgctacgtcccttc
ggccctcaatccagcggaccttccttcccgcggcctgctgccggctctgcggcctcttccgcatcttcgccttcgccctca
gacgagtcggatctccctttgggccgcctccccgcctggaattaattcgagctcggtacctttaagaccaatgacttacaa
ggcagctgtag
Primer
(DNA)
(SEQ ID NO: 786)
tagatggtaccaagaggaaaatttgtttcatacag
Primer
(DNA)
(SEQ ID NO: 787)
tagataagcttgctggatcggtcccggtgtc
Primer
(DNA)
(SEQ ID NO: 788)
tcatacagaaggcgttactagttaggcgtgtacggtgg
Primer
(DNA)
(SEQ ID NO: 789)
acagtaccggattgccaagcttttatcacttatcgtcgtcatccttg
Primer
(DNA)
(SEQ ID NO: 790)
aagttggtaccgttccaaacctttgagggcgacc
Primer
(DNA)
(SEQ ID NO: 791)
aagttctcgagcaggttcagggcgaggaccatag
Primer
(DNA)
(SEQ ID NO: 792)
attgactcgagctctcgacattcgtttctagagc
Primer
(DNA)
(SEQ ID NO: 793)
attgaaagcttttatcacttatcgtcgtcatccttg
Primer
(DNA)
(SEQ ID NO: 794)
tagcaaaataggctgtccc
Primer
(DNA)
(SEQ ID NO: 795)
attgactcgaggctggatcggtcccggtgtc
Primer
(DNA)
(SEQ ID NO: 796)
aagacaccgggaccgatccagcctcgagagacccaagctggctagccacc
Primer
(DNA)
(SEQ ID NO: 797)
ttaccaacagtaccggattgccaagcttttatcacttatcgtcgtcatcc
Primer
(DNA)
(SEQ ID NO: 798)
attgaaagcttctctcgacattcgtttctagagc
Primer
(DNA)
(SEQ ID NO: 799)
attgagagctcttatcacttatcgtcgtcatc
NFAT modif 1 gBLOCK sequence:
(DNA)
(SEQ ID NO: 800)
attctgtggataaccgtattaccgctagcatggatctcggggacgtctaactactaagcgagagtagggaactgccaggc
atcaaataaaacgaaaggctcagtcggaagactgggcctttcgttttatctgttgtttgtcggtgaacgctctcctgagt
aggacaaatccgccgggagcggatttgaacgttgtgaagcaacggcccggagggtggcgggcaggacgcccgccataaac
tgccaggcatcaaactaagcagaaggccatcctgacggatggcctttttgcgtttctacaaactcttcctgttagttagt
tacttaagctcgggccccaaattatgattttgttctgactgatagtgacctgttcgttgcaacaaattgataagcaatgc
ttttttataatgccaactttgtacaaaaaagcaggcttcgctgtgccttctagttgccagccatctgttgtttgcccctc
ccccgtgccttccttgaccctggaaggtgccactcccactgtcctttcctaataaaatgaggaaattgcatcgcattgtc
tgagtaggtgtcattctattctggggggtggggtggggcaggacagcaagggggaggattgggaagacaatagcaggcat
gctggggatgcggtgggctctatggttcgaaggagatagaaccagatcttgactagtggtaccgaattccaggcctgggg
acactcgcggcgggaa
NFAT modif 2 gBLOCK sequences:
(DNA)
(SEQ ID NO: 801)
acaaggatgacgacgataagtgataagagctcgctagcgatatcgccaccatgggggtaaaagttcttttcgcgcttatct
gtatcgcggttgcagaagctaaaccaacagaaaataatgaagactttaacattgttgccgtggcatcgaacttcgccacaa
ccgatttggacgctgatcgcgggaaactgcccggcagccaccacggctcgcaaagctcggtttgcccggacttgcaccgtt
gtgggcgcgggcaagcgcatcgtgagcagcgtcgcttgcagcaccgtgggcgcggccagcaattacgcgaccacggaagcc
gttgttaaccacgcgaagtagcacgtcaagaagctgccgctggaggtgctcaaagagctggaagccaatgcccggaaagct
ggctgcaccaggggctgtctgatctgcctgtcccacatcaagtgcacgcccaagatgaagaagttcatcccaggacgctgc
cacacctacgaaggcgacaaagagtccgcacagggcggcataggcgaggcgatcgtcgacattcctgagattcctgggttc
aaggacttggagcccctggagcagttcatcgcacaggtcgatctgtgtgtggactgcacaactggctgcctcaaagggctt
gccaacgtgcagtgttctgacctgctcaagaagtggctgccgcaacgctgtgcgacctttgccagcaagatccagggccag
gtggacaagatcaagggggccggtggtgactaagcggccgctcgagcatgcatctagaaataattcttactgt
Primer
(DNA)
(SEQ ID NO: 802)
acaaaattcaaaattttatcgatactagttggcctaactggccggtaccaag
Primer
(DNA)
(SEQ ID NO: 803)
atccgatttaaattcgaattcgctagcttatcacttatcgtcgtcatcc
NEAT consensus sequence:
(SEQ ID NO: 804)
(A/T)GGAAA(A/N)(A/T/C)N
Current NFAT RE (Form System Biosciences. The sequence is from the mouse IL2
DNA
(SEQ ID NO: 805)
aagaggaaaatttgtttcatacagaaggcgtt
Mouse IL2 Promoter (highlighted in green the NFAT RE used, highlighted in yellow
is the start codon)
(SEQ ID NO: 806)
aactagagacatataaaataacaccaacatccttagatacaacccttcctgagaatttattggacatcatactcttttta
aaaagcataataaacatcaagacacttacacaaaatatgttaaattaaatttaaaacaacaacgacaaaatagtacctca
agctcaacaagcattttaggtgtccttagcttactatttctctggctaactgtatgaagccatctatcaccctgtgtgca
attagctcattgtgtagataagaaggtaaaaccatcttgaaacaggaaaccaatatccttcctgtctaatcaacaaatct
aaaagatttattcttttcatctatctcctcttgcgtttgtccaccacaacaggctgcttacaggttcaggatggttttga
caaagagaacattttcatgagttacttttgtgtctccaccccaaagaggaaaatttgtttcatacagaaggcgttcattg
tatgaattaaaactgccacctaagtgtgggctaacccgaccaagagggatttcacctaaatccattcagtcagtgtatgg
gggtttaaagaaattccagagagtcatcagaagaggaaaaacaaaaggtaatgctttctgccacacaggtagactctttg
aaaatatgtgtaatatgtaaaacatcgtgacacccccatattatttttccagcattaacagtataaattgcctcccatgc
tgaagagctgcctatcacccttgctaatcactcctcacagtgacctcaagtcctgcaggcatgtacagcatgcagctcgc
atcctgtgtcac
NEAT RE (Form PRomega. The sequence is from the humane IL2 promoter
(DNA)
(SEQ ID NO: 807)
ggaggaaaaactgtttcatacagaaggcgt
Possible NFAT RE from ET-1 promoter
(DNA)
(SEQ ID NO: 808)
tccagggaaaatcggagtagaacaagagggatg
Possible NFAT RE from ET-1 promoter
(DNA)
(SEQ ID NO: 809)
actgttggaaaacgtaaacacgttattaaacggt
Possible NFAT RE from human CD3Y
(DNA)
(SEQ ID NO: 810)
tccttaacggaaaaacaaaa
Possible NFAT RE from human CD3Y
(DNA)
(SEQ ID NO: 811)
aaaggaaaaagtatatgttc
Possible NFAT RE from human IL3 promoter
(DNA)
(SEQ ID NO: 812)
atgccatggaaagggtg
Possible NFAT RE from human GPC6
(DNA)
(SEQ ID NO: 813)
aaggggaaatgttgagtctaga
Possible NFAT RE from human growth hormone-releasing hormone
(DNA)
(SEQ ID NO: 814)
AACTTGGAAAAGCATAG
NFATc1 promoter large
(DNA)
(SEQ ID NO: 815)
ttatgccgtctagaggagacatactttctactcaaagctacacacatagactacaacgatgggaaaagacgacacaccaa
cagcgacttcaggaaagctggagtggctgctaatgttagacaaaataggctttttaaaaaaggttttattaaagaggaat
gtttcgtaatgataaaagcactaatctgtgagaaagatacaacaatgataaacatacgtgcagctaataagagagctcca
aaatctatgaagcaaaaactcacagaatgaggggagaagcagttctacaacagagaatggggacttcgatactccacttt
caataatggatacaacaaccaggcagataacaaggcaacagaaggcctgaacaacagtataaaccaattagacctaccag
atatctatagctagcacactccacccaacgacagcagaatacacattcttctcaagcgcacaagtaacatcctccaggat
gggccatgttctaggccatcaaacaaactcaggtggtttgaggccagaggcctctcttttaaccaccacactagggcctt
cggaggaggcaagcagagagttgtcaaagaggccctcaggactgggtgcagtggctcatgactgtaatcccagcacttta
gaaggctgaggcacaaggatcttttgagctcaggagttcaagaaatgagcacttatccactgggcgcggtggctcacgcc
agtaatccagcactttgggaggcttaggcgggcggatcaagaggtcagaagctcaagaccagcctgaccaacatggtgaa
accccgtctctactaaaagtacaaaaattagccgggcgtggtggcgcacacctgtaatcccagctacttgggaggctgag
gcaggagaatcacttgaacccgggaggtggaggttgcagtgagtggagatcacaccattgcaccccagcctgggcaacag
agcgagactccgtctcaaaaaaaaaaaaaaaaaaaaagaaagaaagaaaaagaaaaaaaaagtgagcatgtattttgcca
gagtctggagattagaattaaattagcaaaccagaattatagaaaaagctatttacttttaagtaaacagctgagatttt
tttttttaagtcagtgtgaatgaagctcacagccatggttggagctgagaaagaaggatttccctttagttatgcacctg
tgtcagcaccttctgactttccttctaaagtctggggtgttcctgaggatccgtaagtttggggttcagggtttctacag
catgctgttacttgtgaaacatctctttaaccatgtcccagagttgcccaggagtttaagaccagcctgagcaacatagc
aagacctcatctcaacaacaacaaaaattagaaataaattagccaggtgtggtgacatgtgcctgtagtcccagctactc
agaaggctgaggcatgaggatcacttgggcccaggaagttggggctgcagggagccctgttcatgccgctgcactccagc
ctgcaagacagagcagaaaaaaagaatcaggatcctgggcagagggaggagaggggaccggggtccagcaagcacttggg
gattgactgaatggcgttggggagagatgactccaaagtcctggagtgggtgagaatgactgcgagtggcttttaggtgg
ggaggttcctgcctggccactccgggaggggacgtggggctgaagggtatcaggtgccgtgctgagcagtttggccttga
tcctaatgccctggacacacgtctagggtaggaaagttgactgatccattggtgatctgagtttttagacatggtggtag
tccatgaggtgggtgttcatgctaagagtttagacagggaaacctatgaagcccttagcaaccctccagggaaggggcgt
ggttaaagagatgtttcataagtaacagcatggtatagaaactctgaaccccaaatgtatgggtcctcaggaacacccca
gactttagaaggaaagtcagaaggtgctgacacgggtgtataactaaagggaaatccttctttctcagctccaaccatgg
ctgtgaggttcattcacactgacttaaaaaaaaaaatctcagtttacttaaaagtaaatagctttttctataattctggt
ttgctaatttaatcctagtctccagaccctggctaaataaatgcccatttctccagatggtctcaagagtctctggacat
cgtgggggcccttccctgttggttggaaggtgcctcaggaagaagggggtggattctgagttgagtcaaaacctcaaaga
cccctgatgggaaaagctctcaagtgaccaccgctgtgggccagaatgcaaaactgcaggaacagaacattcgcaggaac
agaacacagtcgtattaagtgattttcccgagcaggaagtggcatctggcctgcggttcagtagggggaggaaagggtgg
gcgcacctgcccctggctggcgcacctgccaggtagccccacgcggcaccgcgtgtgccgagcgcccctgaggatggaaa
gccccacgcggggcaggtggcacccaccctccgaagacgggacgggatggagcgttgagcttcggggcagctccggcccg
gcccgcgctggagacgcccgcatctgccaggatggcgtctcatagccctggtgctcacacatgacgccaggaagccccag
caacagtgaccgcccaggctctagaaaatattggacggggtggatgaacacccaagtgcgctccaggagaagggatttgg
caccccaaggggcttttaaaacggtaagcttctaggggtgtctttgcccccaataatccatagaaacaacagtcatctaa
aaatagtcttgttttctgtcctaagctccttttaactttgttagtcatcaccaatcctaaaataaaacccgtgtaacgtc
tcccctagtagcggctataaacaaacctacgaggaggcaggaggaagaggaaaggggcgcagggcgctcggggagcagag
ccgggggcccgcggtggccgcagaggccgggccggggcgcagaggccgggcgagctggccgcgctctgggccgccgcctc
cggaactccctgcgcctggcgcgcggccaccgtggtcccggcaacggcattaaacagagggaaacagacccgggattccg
tcacccgggcggggggataaggacggctttgagagcagacaggaaaagggagcttttctgcatggggtgaaaaaattatt
tattgaaggaggaggaggcggcagcggaggaaggggaggggcgggaggaggaggaagagccggccgcccccgccccggcc
ccggctcctcaggagccaagggcagcctcgccaggtcggtcccgggctcgaggaccgcggctggggtcgaggggctcagt
ctcccacgtgaccggctgggcgcgccccgccagacccggcctcgggattccctcctcccggcgagtctccgcccgccccg
tcctggaggtggggagaaggagggcggggcgggggggacggaaactctccccgccaaatcctggccccaggcctggggac
actcgcggcgggaagatttggagggcgggggagggggaggggcgtgggggcgcggcctcgctggagtccccctgaccccc
cgacccccgcccaccggcctgggcgtcctcccgcggcccctcctcccctcccggcgcccggtgctctggggcgcgtgcca
cgcctggctcggcgccgtaggggcccccgcaggtagagacccctggaaatggcctcgacgccgcaggagcgaggcggcca
ccaccccgctaatccgggcacgtctctccaggccgaggcctgcggtggaaaagccggggttccatttgtgctgagtcggg
gcggccgaatggagccaggcctcgggacgcgggacggacgggctctggccgcgcaccttcgcgggctctgcagcgcccga
ccgcctcccccggcagggaggaggcgcttgtggggggcacccacggggcacagtgatccctgggggtctgcggacctcct
gggccccgcagcagacacgagtttagcctttgggtttagtttaaatcacataagggtgtcgtgcaatcgatttatggttt
ctacacaccagacactttaacctccaaccccccccatccaaagccaacaagaaaatgcggtgccgtgttggcagctgagc
tgcgcccgaagagacgcagggagacgtaagagaggaaagtgtgagtggccggggggcctccccccgtcagaagtcgcgca
gtcgcgcccataaaacgccccctccgggcggctagggcaggtgagcgcgtccccgggcctccccacgccggcccctgcca
caggccgtctaggtcgagcagatatttacagaataaaaatgacaataactcgacgtcccgggacggccacgcaatctgtt
agtaatttagcgggatgggaatttcctttctagggcctgccagtgaagcgcttttccaaatttccacagcgggggaagcc
tgcgattttacataatgacttcagcatgccgggctttctcgacacccctccccggcccccggcccccgccccccgcccct
tttccagcagggccgggctccctccggacacccgcgtggactcaggcgtcccgtctggcccgttcgcccccgtttccccc
gccagccccagcgcccccctgcccggcccccggattccccgttcccgcccctacgcccccatcccctccccgtgcgcccc
tccccgtgcgcccccctccccgtgcgccccccctccccgtgcgcccccctccccgtgcgccccccctccccgggcgcccc
cctccccgggcgccccccctccccgtgcgcccccccctccccgtgcgccccccctccccgtgcgcgccccgcctcttgcg
cccctgcccccaggcgagcggctgccgcggcgcggggaggggcgggcgctcggcgactcgtccccggggccccgcgcggg
cccgggcagcaggggcgtgatgtcacggcagggagggggcgcgggagccgccgggccggcggggaggcgggggaggtgtt
ttccagctttaaaaaggcaggaggcagagcgcggccctgcgtcagagcgagactcagaggctccgaactcgccggcggag
tcgccgcgccagatcccagcagcagggcgcgggcaccggggcgcgggcagggctcggagccaccgcgcaggtcctagggc
cgcggccgggccccgccacgcgcgcacacgcccctcgatg
NEATc3 promoter sequence
(DNA)
(SEQ ID NO: 816)
gcagccaggcagggtgggcgcgcgtagggggcggggccgggcgcgcggcagggcgcgagagcgcacccgcggcggcggtg
gcggcgactgtgggggggcggcggggaacattggctaagccgacagtggaggcttaggcaccggtggcgggcggctgcgg
ttcctggtgctgctcggcgcgcggccagctttcggaacggaacgctcggcgtcgcgggccccgcccggaaagtttgccgt
ggagtcgcgacctcttggcccgcgcggcccggcatgaagcggcgttgaggagctgctgccgccgcttgccgctgccgccg
ccgccgcctgaggaggagctgcagcaccctgggccacgccg
NFATc2 promoter sequence 1
(DNA)
(SEQ ID NO: 817)
cagagagaggctgcgttcagactggggcactgccatcccctccgcatca
tggggtctgtggaccaaggtaactgactctcgatcccttccagccttttccgctcgctcctcccggccctttcctgctgc
tcccgtcccgggcagcactttcagctcccggcagaggtcggtgcgggaggcctggggaccccgctcgccctcggcgcaca
ggtagcggggcccgcggaggggcgcccgcgccccggccagggaagggacacttgggaaggcgactttggacaactttacg
cgggggcagggaagtgtcccaggccgggattccctaggccagtctgtcgggaggattttcctctccacgggacaccggga
gggattctcgctactaaccgctggctgtttaaccgtttcagcactcggcttttgacagcaa
NFATc2 promoter sequence 2
(DNA)
(SEQ ID NO: 818)
catcatggggtctgtggaccaaggtaactgactctcgatcccttccagccttttccgctcgctc
NFATc1 response element consensus
(DNA)
(SEQ ID NO: 819)
cattttttccat
NFATc1 response element consensus
(DNA)
(SEQ ID NO: 820)
tttttcca
NFAT response elements contained within the Foxp3 enhancer region
(DNA)
(SEQ ID NO: 821)
acttgaaaatgagataaatgttcacctatgttggcttctagtctcttttatggcttcatt
ttttccatttactatagaggttaagagtgtgggtactggagccagactgtctgggacaa
muE6 IgD/CD8/41BB/CD3z
(DNA)
(SEQ ID NO: 822)
atggccctgcccgtgaccgctttgctgctccccctggcgctgctgctgcacgccgccaggccagaggtgaaggtggtggag
tctgggggagacttagtgaagcctggagggtccctgaaactctcctgtgtagtctctggattcactttcagtagatatggc
atgtcttgggttcgccagactccaggcaagaggctggagtgggtcgcaaccattagtggtggcggtacttacatctactat
ccagacagtgtgaaggggcgattcaccatctccagagacaatgccaagaacaccctgtacctgcaaatgagcagtctgaag
tctgaggacacagccatgtatcactgtacaagggataactacggtaggaactacgactacggtatggactactggggtcaa
ggaacctcagtcaccgtctcctcaggcggtggcggatccggcggtggcggatccggcggtggcggatcccaaattgttctc
acccagtctccagcaatcatgtctgcatctccaggggaggaggtcaccctaacctgcagtgccacctcaagtgtaagttac
atacactggttccagcagaggccaggcacttctcccaaactctggatttatagcacatccaacctggcttctggagtccct
gttcgcttcagtggcagtggatatgggacctcttactctctcacaatcagccgaatggaggctgaagatgctgccacttat
tactgccagcaaaggagtagttccccattcacgttcggctcggggacaaagttggaaataaaagagtctccaaaggcaca
ggcctcctcagtgcccactgcacaaccccaagcagagggcagcctcgccaaggcaaccacagccccagccaccacccgta
acacaggaagaggcggcgaagagaagaaaaaggagaaggagaaagaggaacaagaagagagagagacaaagacaccaatc
tacatttgggccccgctcgcaggcacatgtggagtgctcctcctctccctggtgattaccctgtactgcaaaaggggccgc
aaaaaactcctttacatttttaagcagccttttatgaggccagtacagacgactcaagaggaagacgggtgctcatgccgc
tttcctgaggaggaggaaggagggtgcgaactgcgcgttaagttctcccgatcagccgacgcgcctgcttacaagcagggc
cagaaccaactgtacaacgagctgaatctcggtagacgggaagagtacgacgtgttggacaaacggagaggccgcgaccca
gaaatgggcggcaagcctcgcaggaaaaacccccaggagggactgtacaatgagttgcagaaagataagatggcagaagct
tatagcgagatcggaatgaagggggaaaggagacgagggaaaggacacgacggcctttatcagggcctgtccacagcaaca
aaagatacgtatgacgccctccatatgcaggcacttccaccacggtgataa
(amino acids)
(SEQ ID NO: 823)
MALPVTALLLPLALLLHAARPEVKVVESGGDLVKPGGSLKLSCVVSGFTFSRYGMSWVRQTPGKRLEWVATISGGGTYIY
YPDSVKGRFTISRDNAKNTLYLQMSSLKSEDTAMYHCTRDNYGRNYDYGMDYWGQGTSVTVSSGGGGSGGGGSGGGGSQI
VLTQSPAIMSASPGEEVTLTCSATSSVSYIHWFQQRPGTSPKLWIYSTSNLASGVPVRESGSGYGTSYSLTISRMEAEDA
ATYYCQQRSSSPFTFGSGTKLEIKESPKAQASSVPTAQPQAEGSLAKATTAPATTRNTGRGGEEKKKEKEKEEQEERETK
TPIYIWAPLAGTCGVLLLSLVITLYCKRGRKKLLYIFKQPFMRPVQTTQEEDGCSCRFPEEEEGGCELRVKFSRSADAPA
YKQGQNQLYNELNLGRREEYDVLDKRRGRDPEMGGKPRRKNPQEGLYNELQKDKMAEAYSEIGMKGERRRGKGHDGLYQG
LSTATKDTYDALHMQALPPR**
muC2 IgD/CD8/41BB/CD3z
(DNA)
(SEQ ID NO: 824)
atggccctgcccgtgaccgctttgctgctccccctggcgctgctgctgcacgccgccaggccagaggtccagctggaggag
tcagggggaggcttagtgaagcctggagggtccctgaaactctcctgtgcagcctctggattcactttcagtggctatgcc
atgtcttgggttcgccagactccggagaagaggctggagtgggtcgcaaccattagtagtggtggtacttatatctactat
ccagacagtgtgaaggggcgattcaccatctccagagacaatgccaagaacaccctgtacctgcaaatgagcagtctgagg
tctgaggacacggccatgtattactgtgcaagacttgggggggataattactacgaatacttcgatgtctggggcgcaggg
accacggtcaccgtctcctccggcggtggcggatccggcggtggcggatccggcggtggcggatccgacattgtgatcaca
cagtctacagcttccttaggtgtatctctggggcagagggccaccatctcatgcagggccagcaaaagtgtcagtacatct
ggctatagttatatgcactggtaccaacagagaccaggacagccacccaaactcctcatctatcttgcatccaacctagaa
tctggggtccctgccaggttcagtggcagtgggtctgggacagacttcaccctcaacatccatcctgtggaggaggaggat
gctgcaacctattactgtcagcacagtagggagcttccgttcacgttcggaggggggaccaagctggagataaaagagtc
tccaaaggcacaggcctcctcagtgcccactgcacaaccccaagcagagggcagcctcgccaaggcaaccacagccccag
ccaccacccgtaacacaggaagaggcggcgaagagaagaaaaaggagaaggagaaagaggaacaagaagagagagagaca
aagacaccaatctacatttgggccccgctcgcaggcacatgtggagtgctcctcctctccctggtgattaccctgtactg
caaaaggggccgcaaaaaactcctttacatttttaagcagccttttatgaggccagtacagacgactcaagaggaagacgg
gtgctcatgccgctttcctgaggaggaggaaggagggtgcgaactgcgcgttaagttctcccgatcagccgacgcgcctgc
ttacaagcagggccagaaccaactgtacaacgagctgaatctcggtagacgggaagagtacgacgtgttggacaaacggag
aggccgcgacccagaaatgggcggcaagcctcgcaggaaaaacccccaggagggactgtacaatgagttgcagaaagataa
gatggcagaagcttatagcgagatcggaatgaagggggaaaggagacgagggaaaggacacgacggcctttatcagggcct
gtccacagcaacaaaagatacgtatgacgccctccatatgcaggcacttccaccacggtgataa
(amino acids)
(SEQ ID NO: 825)
MALPVTALLLPLALLLHAARPEVQLEESGGGLVKPGGSLKLSCAASGFTFSGYAMSWVRQTPEKRLEWVATISSGGTYIY
YPDSVKGRFTISRDNAKNTLYLQMSSLRSEDTAMYYCARLGGDNYYEYFDVWGAGTTVTVSSGGGGSGGGGSGGGGSDIV
ITQSTASLGVSLGQRATISCRASKSVSTSGYSYMHWYQQRPGQPPKLLIYLASNLESGVPARFSGSGSGTDFTLNIHPVE
EEDAATYYCQHSRELPFTFGGGTKLEIKESPKAQASSVPTAQPQAEGSLAKATTAPATTRNTGRGGEEKKKEKEKEEQEE
RETKTPIYIWAPLAGTCGVLLLSLVITLYCKRGRKKLLYIFKQPFMRPVQTTQEEDGCSCRFPEEEEGGCELRVKESRSA
DAPAYKQGQNQLYNELNLGRREEYDVLDKRRGRDPEMGGKPRRKNPQEGLYNELQKDKMAEAYSEIGMKGERRRGKGHDG
LYQGLSTATKDTYDALHMQALPPR**
muE6 CD28/CD28/CD28/CD3z
(DNA)
(SEQ ID NO: 826)
atggccctgcccgtgaccgctttgctgctccccctggcgctgctgctgcacgccgccaggccagaggtgaaggtggtgga
gtctgggggagacttagtgaagcctggagggtccctgaaactctcctgtgtagtctctggattcactttcagtagatatg
gcatgtcttgggttcgccagactccaggcaagaggctggagtgggtcgcaaccattagtggtggcggtacttacatctac
tatccagacagtgtgaaggggcgattcaccatctccagagacaatgccaagaacaccctgtacctgcaaatgagcagtct
gaagtctgaggacacagccatgtatcactgtacaagggataactacggtaggaactacgactacggtatggactactggg
gtcaaggaacctcagtcaccgtctcctcaggcggtggcggatccggcggtggcggatccggcggtggcggatcccaaatt
gttctcacccagtctccagcaatcatgtctgcatctccaggggaggaggtcaccctaacctgcagtgccacctcaagtgt
aagttacatacactggttccagcagaggccaggcacttctcccaaactctggatttatagcacatccaacctggcttctg
gagtccctgttcgcttcagtggcagtggatatgggacctcttactctctcacaatcagccgaatggaggctgaagatgct
gccacttattactgccagcaaaggagtagttccccattcacgttcggctcggggacaaagttggaaataaaaaaacacct
ttgtccaagtcccctatttcccggaccttctaagcccttttgggtgctggtggtggttggtggagtcctggcttgctata
gcttgctagtaacagtggcctttattattttctgggtgagaagcaagcggtctcggctcctgcattctgattacatgaac
atgaccccaagaagaccaggccccaccaggaaacattaccagccctacgctccgccacgcgacttcgctgcctaccggtc
ccgcgttaagttctcccgatcagccgacgcgcctgcttacaagcagggccagaaccaactgtacaacgagctgaatctcg
gtagacgggaagagtacgacgtgttggacaaacggagaggccgcgacccagaaatgggcggcaagcctcgcaggaaaaac
ccccaggagggactgtacaatgagttgcagaaagataagatggcagaagcttatagcgagatcggaatgaagggggaaag
gagacgagggaaaggacacgacggcctttatcagggcctgtccacagcaacaaaagatacgtatgacgccctccatatgc
aggcacttccaccacggtgataa
(amino acids)
(SEQ ID NO: 827)
MALPVTALLLPLALLLHAARPEVKVVESGGDLVKPGGSLKLSCVVSGFTFSRYGMSWVRQTPGKRLEWVATISGGGTYIY
YPDSVKGRFTISRDNAKNTLYLQMSSLKSEDTAMYHCTRDNYGRNYDYGMDYWGQGTSVTVSSGGGGSGGGGSGGGGSQI
VLTQSPAIMSASPGEEVTLTCSATSSVSYIHWFQQRPGTSPKLWIYSTSNLASGVPVRESGSGYGTSYSLTISRMEAEDA
ATYYCQQRSSSPFTFGSGTKLEIKKHLCPSPLFPGPSKPFWVLVVVGGVLACYSLLVTVAFIIFWVRSKRSRLLHSDYMN
MTPRRPGPTRKHYQPYAPPRDFAAYRSRVKFSRSADAPAYKQGQNQLYNELNLGRREEYDVLDKRRGRDPEMGGKPRRKN
PQEGLYNELQKDKMAEAYSEIGMKGERRRGKGHDGLYQGLSTATKDTYDALHMQALPPR**
muC2 CD28/CD28/CD28/CD3z
(DNA)
(SEQ ID NO: 828)
atggccctgcccgtgaccgctttgctgctccccctggcgctgctgctgcacgccgccaggccagaggtccagctggaggag
tcagggggaggcttagtgaagcctggagggtccctgaaactctcctgtgcagcctctggattcactttcagtggctatgcc
atgtcttgggttcgccagactccggagaagaggctggagtgggtcgcaaccattagtagtggtggtacttatatctactat
ccagacagtgtgaaggggcgattcaccatctccagagacaatgccaagaacaccctgtacctgcaaatgagcagtctgagg
tctgaggacacggccatgtattactgtgcaagacttgggggggataattactacgaatacttcgatgtctggggcgcaggg
accacggtcaccgtctcctccggcggtggcggatccggcggtggcggatccggcggtggcggatccgacattgtgatcaca
cagtctacagcttccttaggtgtatctctggggcagagggccaccatctcatgcagggccagcaaaagtgtcagtacatct
ggctatagttatatgcactggtaccaacagagaccaggacagccacccaaactcctcatctatcttgcatccaacctagaa
tctggggtccctgccaggttcagtggcagtgggtctgggacagacttcaccctcaacatccatcctgtggaggaggaggat
gctgcaacctattactgtcagcacagtagggagcttccgttcacgttcggaggggggaccaagctggagataaaaaaacac
ctttgtccaagtcccctatttcccggaccttctaagcccttttgggtgctggtggtggttggtggagtcctggcttgctat
agcttgctagtaacagtggcctttattattttctgggtgagaagcaagcggtctcggctcctgcattctgattacatgaac
atgaccccaagaagaccaggccccaccaggaaacattaccagccctacgctccgccacgcgacttcgctgcctaccggtcc
cgcgttaagttctcccgatcagccgacgcgcctgcttacaagcagggccagaaccaactgtacaacgagctgaatctcggt
agacgggaagagtacgacgtgttggacaaacggagaggccgcgacccagaaatgggcggcaagcctcgcaggaaaaacccc
caggagggactgtacaatgagttgcagaaagataagatggcagaagcttatagcgagatcggaatgaagggggaaaggaga
cgagggaaaggacacgacggcctttatcagggcctgtccacagcaacaaaagatacgtatgacgccctccatatgcaggca
cttccaccacggtgataa
(amino acids)
(SEQ ID NO: 829)
MALPVTALLLPLALLLHAARPEVQLEESGGGLVKPGGSLKLSCAASGFTFSGYAMSWVRQTPEKRLEWVATISSGGTYIY
YPDSVKGRFTISRDNAKNTLYLQMSSLRSEDTAMYYCARLGGDNYYEYFDVWGAGTTVTVSSGGGGSGGGGSGGGGSDIV
ITQSTASLGVSLGQRATISCRASKSVSTSGYSYMHWYQQRPGQPPKLLIYLASNLESGVPARFSGSGSGTDFTLNIHPVE
EEDAATYYCQHSRELPFTFGGGTKLEIKKHLCPSPLFPGPSKPFWVLVVVGGVLACYSLLVTVAFIIFWVRSKRSRLLHS
DYMNMTPRRPGPTRKHYQPYAPPRDFAAYRSRVKFSRSADAPAYKQGQNQLYNELNLGRREEYDVLDKRRGRDPEMGGKP
RRKNPQEGLYNELQKDKMAEAYSEIGMKGERRRGKGHDGLYQGLSTATKDTYDALHMQALPPR**
CD19 IgD/CD8/41BB/CD3z
(DNA)
(SEQ ID NO: 830)
atggccctgcccgtgaccgctttgctgctccccctggcgctgctgctgcacgccgccaggccagacatacagatgacgca
gacgaccagcagcctttccgcttccctgggcgaccgagtaaccattagttgtagagcatctcaggatatttctaagtatc
tgaattggtaccaacagaaacctgatggcactgtcaagctcttgatatatcacaccagtcgactccattcaggcgtccct
tccagattcagtgggagtggcagcgggactgattactccctcactatctctaacctggaacaggaagacatcgctacata
cttctgtcagcagggaaacactctcccctatacctttgggggaggaaccaagttggaaataacaggcggtggcggatccg
gcggtggcggatccggcggtggcggatccgaggtgaaactgcaggagtcaggacctggcctggtggcgccctcacagagc
ctgtccgtcacatgcactgtctcaggggtctcattacccgactatggtgtaagctggattcgccagcctccacgaaaggg
tctggagtggctgggagtaatatggggtagtgaaaccacatactataattcagctctcaaatccagactgaccatcatca
aggacaactccaagagccaagttttcttaaaaatgaacagtctgcaaactgatgacacagccatttactactgtgccaaa
cattattactacggtggtagctatgctatggactactggggccaaggaacctcagtcaccgtctcctcagagtctccaaa
ggcacaggcctcctcagtgcccactgcacaaccccaagcagagggcagcctcgccaaggcaaccacagccccagccacca
cccgtaacacaggaagaggcggcgaagagaagaaaaaggagaaggagaaagaggaacaagaagagagagagacaaagaca
ccaatctacatttgggccccgctcgcaggcacatgtggagtgctcctcctctccctggtgattaccctgtactgcaaaag
gggccgcaaaaaactcctttacatttttaagcagccttttatgaggccagtacagacgactcaagaggaagacgggtgctc
atgccgctttcctgaggaggaggaaggagggtgcgaactgcgcgttaagttctcccgatcagccgacgcgcctgcttacaa
gcagggccagaaccaactgtacaacgagctgaatctcggtagacgggaagagtacgacgtgttggacaaacggagaggccg
cgacccagaaatgggcggcaagcctcgcaggaaaaacccccaggagggactgtacaatgagttgcagaaagataagatggc
agaagcttatagcgagatcggaatgaagggggaaaggagacgagggaaaggacacgacggcctttatcagggcctgtccac
agcaacaaaagatacgtatgacgccctccatatgcaggcacttccaccacggtgataa
(amino acids)
(SEQ ID NO: 831)
MALPVTALLLPLALLLHAARPDIQMTQTTSSLSASLGDRVTISCRASQDISKYLNWYQQKPDGTVKLLIYHTSRLHSGVP
SRFSGSGSGTDYSLTISNLEQEDIATYFCQQGNTLPYTFGGGTKLEITGGGGSGGGGSGGGGSEVKLQESGPGLVAPSQS
LSVTCTVSGVSLPDYGVSWIRQPPRKGLEWLGVIWGSETTYYNSALKSRLTIIKDNSKSQVFLKMNSLQTDDTAIYYCAK
HYYYGGSYAMDYWGQGTSVTVSSESPKAQASSVPTAQPQAEGSLAKATTAPATTRNTGRGGEEKKKEKEKEEQEERETKT
PIYIWAPLAGTCGVLLLSLVITLYCKRGRKKLLYIFKQPFMRPVQTTQEEDGCSCRFPEEEEGGCELRVKESRSADAPAY
KQGQNQLYNELNLGRREEYDVLDKRRGRDPEMGGKPRRKNPQEGLYNELQKDKMAEAYSEIGMKGERRRGKGHDGLYQGL
STATKDTYDALHMQALPPR**

[0451] Those skilled in the art will recognize, or be able to ascertain using no more than routine experimentation, many equivalents to the specific embodiments of the invention specifically described herein.

1-26. (canceled)

27. An immune cell that expresses a chimeric antigen receptor (CAR) and a recombinant polypeptide that is not a CAR.

28. The immune cell of claim 27, wherein the CAR comprises a single chain variable fragment (scFv) antibody that binds to an extracellular region of MUC1*, wherein the scFv comprises:
a. a heavy chain (HC) variable region comprising an HC complementarity determining region 1 (CDR1) comprising SEQ ID NO: 123, an HC-CDR2 comprising SEQ ID NO: 127, and an HC-CDR3 comprising SEQ ID NO: 131; and
b. a light chain (LC) variable region comprising an LC-CDR1 comprising SEQ ID NO: 173, an LC-CDR2 comprising SEQ ID NO: 177, and an LC-CDR3 comprising SEQ ID NO: 181; or
c. an HC variable region comprising an HC-CDR1 comprising SEQ ID NO: 17, an HC-CDR2 comprising SEQ ID NO: 21, and an HC-CDR3 comprising SEQ ID NO: 25; and
d. a LC variable region comprising an LC-CDR1 comprising SEQ ID NO: 70, an LC-CDR2 comprising SEQ ID NO: 74, and an LC-CDR3 comprising SEQ ID NO: 78.

29. The immune cell of claim 27, wherein the recombinant polypeptide is a cytokine.

30. The immune cell of claim 29, wherein the cytokine is IL-7, IL-12, IL-15, or IL-18.

31. The immune cell of claim 29, wherein the cytokine is IL-12.

32. The immune cell of claim 29, wherein the cytokine is IL-18.

33. The immune cell of claim 27, wherein expression of the recombinant polypeptide is inducible.

34. The immune cell of claim 27, wherein expression of the recombinant polypeptide is under the control of a promoter comprising a nuclear factor of activated T cells (NFAT) response element.

35. The immune cell of claim 34, wherein the promoter comprises 2-8 of the NFAT response element.

36. The immune cell of claim 34, wherein the promoter comprises 6 of the NFAT response element.

37. The immune cell of claim 34, wherein the NFAT response element comprises SEQ ID NO: 821.

38. The immune cell of claim 34, wherein the NFAT response element comprises SEQ ID NO: 820.

39. The immune cell of claim 34, wherein the NFAT response element comprises SEQ ID NO: 819.

40. The immune cell of claim 34, wherein the recombinant polypeptide is IL-18 and the NFAT response element comprises SEQ ID NO: 821.

41. The immune cell of claim 34, wherein the recombinant polypeptide is IL-18 and the NFAT response element comprises SEQ ID NO: 820.

42. The immune cell of claim 34, wherein the recombinant polypeptide is IL-18 and the NFAT response element comprises SEQ ID NO: 819.

43. An immune cell comprising an anti-MUC1* CAR and a recombinant polypeptide that is not a CAR.

44. The immune cell of claim 43, wherein the recombinant polypeptide is a cytokine.

45. The immune cell of claim 44, wherein the cytokine is IL-7, IL-12, IL-15, or IL-18.

46. The immune cell of claim 44, wherein the cytokine is IL-12.

47. The immune cell of claim 44, wherein the cytokine is IL-18.

48. The immune cell of claim 43, wherein expression of the recombinant polypeptide is inducible.

49. The immune cell of claim 43, wherein expression of the recombinant polypeptide is under the control of a promoter comprising an NFAT response element.

50. The immune cell of claim 49, wherein the promoter comprises 2-8 of the NFAT response element.

51. The immune cell of claim 49, wherein the promoter comprises 6 of the NFAT response element.

52. The immune cell of claim 49, wherein the NFAT response element comprises SEQ ID NO: 821.

53. The immune cell of claim 49, wherein the NFAT response element comprises SEQ ID NO: 820.

54. The immune cell of claim 49, wherein the NFAT response element comprises SEQ ID NO: 819.

55. The immune cell of claim 49, wherein the NFAT response element comprises SEQ ID NO: 649 or SEQ ID NO: 776.

56. The immune cell of claim 49, wherein the NFAT response element comprises SEQ ID NO: 804.

57. The immune cell of claim 49, wherein the NFAT response element comprises any one of SEQ ID NOs: 805, and 807-814.

58. The immune cell of claim 49, wherein the NFAT response element comprises SEQ ID NO: 650 or SEQ ID NO: 777.

59. The immune cell of claim 43, wherein expression of the recombinant polypeptide is under the control of an inducible promoter comprising SEQ ID NO 646, SEQ ID NO: 781, SEQ ID NO: 782, or SEQ ID NO: 783.

60. The immune cell of claim 49, wherein the NFAT response element comprises any one of SEQ ID NOs: 816-818.

61. A method of treating a MUC1* positive cancer comprising administering the immune cell of claim 43.

62. A method of treating a MUC1* positive cancer in a subject comprising:
a) introducing a nucleic acid encoding an anti-MUC1* CAR into an immune cell;
b) contacting the immune cell with a peptide comprising a sequence of an extracellular domain of MUC1*; and
c) administering the immune cell to the subject.

The application's sequence listing, which the Patent Office published only in electronic form, follows.

SEQUENCE LISTING (831 sequences)

SEQ ID NO: 1 - protein, 1255 aa, synthetic construct
  REGION 1..1255: note = MUC1 Receptor
MTPGTQSPFFLLLLLTVLTVVTGSGHASSTPGGEKETSATQRSSVPSSTEKNAVSMTSSVLSSHSPGSGSSTTQGQDVTLAPATEPASGSAATWGQDVTSVPVTRPALGSTTPPAHDVTSAPDNKPAPGSTAPPAHGVTSAPDTRPAPGSTAPPAHGVTSAPDTRPAPGSTAPPAHGVTSAPDTRPAPGSTAPPAHGVTSAPDTRPAPGSTAPPAHGVTSAPDTRPAPGSTAPPAHGVTSAPDTRPAPGSTAPPAHGVTSAPDTRPAPGSTAPPAHGVTSAPDTRPAPGSTAPPAHGVTSAPDTRPAPGSTAPPAHGVTSAPDTRPAPGSTAPPAHGVTSAPDTRPAPGSTAPPAHGVTSAPDTRPAPGSTAPPAHGVTSAPDTRPAPGSTAPPAHGVTSAPDTRPAPGSTAPPAHGVTSAPDTRPAPGSTAPPAHGVTSAPDTRPAPGSTAPPAHGVTSAPDTRPAPGSTAPPAHGVTSAPDTRPAPGSTAPPAHGVTSAPDTRPAPGSTAPPAHGVTSAPDTRPAPGSTAPPAHGVTSAPDTRPAPGSTAPPAHGVTSAPDTRPAPGSTAPPAHGVTSAPDTRPAPGSTAPPAHGVTSAPDTRPAPGSTAPPAHGVTSAPDTRPAPGSTAPPAHGVTSAPDTRPAPGSTAPPAHGVTSAPDTRPAPGSTAPPAHGVTSAPDTRPAPGSTAPPAHGVTSAPDTRPAPGSTAPPAHGVTSAPDTRPAPGSTAPPAHGVTSAPDTRPAPGSTAPPAHGVTSAPDTRPAPGSTAPPAHGVTSAPDTRPAPGSTAPPAHGVTSAPDTRPAPGSTAPPAHGVTSAPDTRPAPGSTAPPAHGVTSAPDTRPAPGSTAPPAHGVTSAPDTRPAPGSTAPPAHGVTSAPDTRPAPGSTAPPAHGVTSAPDTRPAPGSTAPPAHGVTSAPDTRPAPGSTAPPAHGVTSAPDNRPALGSTAPPVHNVTSASGSASGSASTLVHNGTSARATTTPASKSTPFSIPSHHSDTPTTLASHSTKTDASSTHHSSVPPLTSSNHSTSPQLSTGVSFFFLSFHISNLQFNSSLEDPSTDYYQELQRDISEMFLQIYKQGGFLGLSNIKFRPGSVVVQLTLAFREGTINVHDVETQFNQYKTEAASRYNLTISDVSVSDVPFPFSAQSGAGVPGWGIALLVLVCVLVALAIVYLIALAVCQCRRKNYGQLDIFPARDTYHPMSEYPTYHTHGRYVPPSSTDRSPYEKVSAGNGGSSLSYTNPAVAAASANL

SEQ ID NO: 2 - protein, 45 aa, synthetic construct
  REGION 1..45: note = PSMGFR
GTINVHDVETQFNQYKTEAASRYNLTISDVSVSDVPFPFSAQSGA

SEQ ID NO: 3 - DNA, 459 bp, synthetic construct
  misc_feature 1..459: note = Human NME1
  source 1..459: mol_type = other DNA
atggccaactgtgagcgtaccttcattgcgatcaaaccagatggggtccagcggggtcttgtgggagagattatcaagcgttttgagcagaaaggattccgccttgttggtctgaaattcatgcaagcttccgaagatcttctcaaggaacactacgttgacctgaaggaccgtccattctttgccggcctggtgaaatacatgcactcagggccggtagttgccatggtctgggaggggctgaatgtggtgaagacgggccgagtcatgctcggggagaccaaccctgcagactccaagcctgggaccatccgtggagacttctgcatacaagttggcaggaacattatacatggcagtgattctgtggagagtgcagagaaggagatcggcttgtggtttcaccctgaggaactggtagattacacgagctgtgctcagaactggatctatgaatga

SEQ ID NO: 4 - protein, 152 aa, synthetic construct
  REGION 1..152: note = Human NME1
MANCERTFIAIKPDGVQRGLVGEIIKRFEQKGFRLVGLKFMQASEDLLKEHYVDLKDRPFFAGLVKYMHSGPVVAMVWEGLNVVKTGRVMLGETNPADSKPGTIRGDFCIQVGRNIIHGSDSVESAEKEIGLWFHPEELVDYTSCAQNWIYE

SEQ ID NO: 5 - DNA, 1131 bp, synthetic construct
  misc_feature 1..1131: note = Human NME7
  source 1..1131: mol_type = other DNA
atgaatcatagtgaaagattcgttttcattgcagagtggtatgatccaaatgcttcacttcttcgacgttatgagcttttattttacccaggggatggatctgttgaaatgcatgatgtaaagaatcatcgcacctttttaaagcggaccaaatatgataacctgcacttggaagatttatttataggcaacaaagtgaatgtcttttctcgacaactggtattaattgactatggggatcaatatacagctcgccagctgggcagtaggaaagaaaaaacgctagccctaattaaaccagatgcaatatcaaaggctggagaaataattgaaataataaacaaagctggatttactataaccaaactcaaaatgatgatgctttcaaggaaagaagcattggattttcatgtagatcaccagtcaagaccctttttcaatgagctgatccagtttattacaactggtcctattattgccatggagattttaagagatgatgctatatgtgaatggaaaagactgctgggacctgcaaactctggagtggcacgcacagatgcttctgaaagcattagagccctctttggaacagatggcataagaaatgcagcgcatggccctgattcttttgcttctgcggccagagaaatggagttgttttttccttcaagtggaggttgtgggccggcaaacactgctaaatttactaattgtacctgttgcattgttaaaccccatgctgtcagtgaaggactgttgggaaagatcctgatggctatccgagatgcaggttttgaaatctcagctatgcagatgttcaatatggatcgggttaatgttgaggaattctatgaagtttataaaggagtagtgaccgaatatcatgacatggtgacagaaatgtattctggcccttgtgtagcaatggagattcaacagaataatgctacaaagacatttcgagaattttgtggacctgctgatcctgaaattgcccggcatttacgccctggaactctcagagcaatctttggtaaaactaagatccagaatgctgttcactgtactgatctgccagaggatggcctattagaggttcaatacttcttcaagatcttggataattag

SEQ ID NO: 6 - protein, 376 aa, synthetic construct
  REGION 1..376: note = Human NME7
MNHSERFVFIAEWYDPNASLLRRYELLFYPGDGSVEMHDVKNHRTFLKRTKYDNLHLEDLFIGNKVNVFSRQLVLIDYGDQYTARQLGSRKEKTLALIKPDAISKAGEIIEIINKAGFTITKLKMMMLSRKEALDFHVDHQSRPFFNELIQFITTGPIIAMEILRDDAICEWKRLLGPANSGVARTDASESIRALFGTDGIRNAAHGPDSFASAAREMELFFPSSGGCGPANTAKFTNCTCCIVKPHAVSEGLLGKILMAIRDAGFEISAMQMFNMDRVNVEEFYEVYKGVVTEYHDMVTEMYSGPCVAMEIQQNNATKTFREFCGPADPEIARHLRPGTLRAIFGKTKIQNAVHCTDLPEDGLLEVQYFFKILDN

SEQ ID NO: 7 - protein, 16 aa, synthetic construct
  REGION 1..16: note = NME7 peptide 1 (A domain)
MLSRKEALDFHVDHQS

SEQ ID NO: 8 - protein, 11 aa, synthetic construct
  REGION 1..11: note = NME7A peptide 2 (A domain)
SGVARTDASES

SEQ ID NO: 9 - protein, 20 aa, synthetic construct
  REGION 1..20: note = NME7B peptide 1 (B domain)
DAGFEISAMQMFNMDRVNVE

SEQ ID NO: 10 - protein, 16 aa, synthetic construct
  REGION 1..16: note = NME7B peptide 2 (B domain)
EVYKGVVTEYHDMVTE

SEQ ID NO: 11 - protein, 29 aa, synthetic construct
  REGION 1..29: note = NME7B peptide 3 (B domain)
AIFGKTKIQNAVHCTDLPEDGLLEVQYFF

SEQ ID NO: 12 - DNA, 366 bp, synthetic construct
  misc_feature 1..366: note = Mouse E6 Heavy chain variable region sequence
  source 1..366: mol_type = other DNA
gaggtgaaggtggtggagtctgggggagacttagtgaagcctggagggtccctgaaactctcctgtgtagtctctggattcactttcagtagatatggcatgtcttgggttcgccagactccaggcaagaggctggagtgggtcgcaaccattagtggtggcggtacttacatctactatccagacagtgtgaaggggcgattcaccatctccagagacaatgccaagaacaccctgtacctgcaaatgagcagtctgaagtctgaggacacagccatgtatcactgtacaagggataactacggtaggaactacgactacggtatggactactggggtcaaggaacctcagtcaccgtctcctca

SEQ ID NO: 13 - protein, 122 aa, synthetic construct
  REGION 1..122: note = Mouse E6 Heavy chain variable region sequence
EVKVVESGGDLVKPGGSLKLSCVVSGFTFSRYGMSWVRQTPGKRLEWVATISGGGTYIYYPDSVKGRFTISRDNAKNTLYLQMSSLKSEDTAMYHCTRDNYGRNYDYGMDYWGQGTSVTVSS

SEQ ID NO: 14 - DNA, 75 bp, synthetic construct
  misc_feature 1..75: note = Mouse E6 heavy chain variable framework region 1 (FWR1) sequence
  source 1..75: mol_type = other DNA
gaggtgaaggtggtggagtctgggggagacttagtgaagcctggagggtccctgaaactctcctgtgtagtctct

SEQ ID NO: 15 - protein, 30 aa, synthetic construct
  REGION 1..30: note = Mouse E6 heavy chain variable framework region 1 (FWR1) sequence
EVKVVESGGDLVKPGGSLKLSCVVSGFTFS

SEQ ID NO: 16 - DNA, 30 bp, synthetic construct
  misc_feature 1..30: note = Mouse E6 heavy chain variable complementarity determining regions 1 (CDR1) sequence
  source 1..30: mol_type = other DNA
ggattcactttcagtagatatggcatgtct

SEQ ID NO: 17 - protein, 5 aa, synthetic construct
  REGION 1..5: note = Mouse E6 heavy chain variable complementarity determining regions 1 (CDR1) sequence
RYGMS

SEQ ID NO: 18 - DNA, 42 bp, synthetic construct
  misc_feature 1..42: note = Mouse E6 heavy chain variable framework region 2 (FWR2) sequence
  source 1..42: mol_type = other DNA
tgggttcgccagactccaggcaagaggctggagtgggtcgca

SEQ ID NO: 19 - protein, 14 aa, synthetic construct
  REGION 1..14: note = Mouse E6 heavy chain variable framework region 2 (FWR2) sequence
WVRQTPGKRLEWVA

SEQ ID NO: 20 - DNA, 51 bp, synthetic construct
  misc_feature 1..51: note = Mouse E6 heavy chain variable complementarity determining regions 2 (CDR2) sequence
  source 1..51: mol_type = other DNA
accattagtggtggcggtacttacatctactatccagacagtgtgaagggg

SEQ ID NO: 21 - protein, 17 aa, synthetic construct
  REGION 1..17: note = Mouse E6 heavy chain variable complementarity determining regions 2 (CDR2) sequence
TISGGGTYIYYPDSVKG

SEQ ID NO: 22 - DNA, 96 bp, synthetic construct
  misc_feature 1..96: note = Mouse E6 heavy chain variable framework region 3 (FWR3) acid sequence
  source 1..96: mol_type = other DNA
cgattcaccatctccagagacaatgccaagaacaccctgtacctgcaaatgagcagtctgaagtctgaggacacagccatgtatcactgtacaagg

SEQ ID NO: 23 - protein, 32 aa, synthetic construct
  REGION 1..32: note = Mouse E6 heavy chain variable framework region 3 (FWR3) acid sequence
RFTISRDNAKNTLYLQMSSLKSEDTAMYHCTR

SEQ ID NO: 24 - DNA, 39 bp, synthetic construct
  misc_feature 1..39: note = Mouse E6 heavy chain variable complementarity determining regions 3 (CDR3) sequence
  source 1..39: mol_type = other DNA
gataactacggtaggaactacgactacggtatggactac

SEQ ID NO: 25 - protein, 13 aa, synthetic construct
  REGION 1..13: note = Mouse E6 heavy chain variable complementarity determining regions 3 (CDR3) sequence
DNYGRNYDYGMDY

SEQ ID NO: 26 - DNA, 294 bp, synthetic construct
  misc_feature 1..294: note = IGHV3-21*03 heavy chain variable region sequence
  source 1..294: mol_type = other DNA
gaggtgcagctggtggagtctgggggaggcctggtcaagcctggggggtccctgagactctcctgtgcagcctctggattcaccttcagtagctatagcatgaactgggtccgccaggctccagggaaggggctggagtgggtctcatccattagtagtagtagtagttacatatactacgcagactcagtgaagggccgattcaccatctccagagacaacgccaagaactcactgtatctgcaaatgaacagcctgagagccgaggacacggctgtgtattactgtgcgaga

SEQ ID NO: 27 - protein, 98 aa, synthetic construct
  REGION 1..98: note = IGHV3-21*03 heavy chain variable region sequence
EVQLVESGGGLVKPGGSLRLSCAASGFTFSSYSMNWVRQAPGKGLEWVSSISSSSSYIYYADSVKGRFTISRDNAKNSLYLQMNSLRAEDTAVYYCAR

SEQ ID NO: 28 - DNA, 90 bp, synthetic construct
  misc_feature 1..90: note = IGHV3-21*01 heavy chain variable framework region 1 (FWR1) sequence
  source 1..90: mol_type = other DNA
gaggtgcagctggtggagtctgggggaggcctggtcaagcctggggggtccctgagactctcctgtgcagcctctggattcaccttcagt

SEQ ID NO: 29 - protein, 30 aa, synthetic construct
  REGION 1..30: note = IGHV3-21*01 heavy chain variable framework region 1 (FWR1) sequence
EVQLVESGGGLVKPGGSLRLSCAASGFTFS

SEQ ID NO: 30 - DNA, 15 bp, synthetic construct
  misc_feature 1..15: note = IGHV3-21*01 heavy chain variable complementarity determining regions 1 (CDR1) sequence
  source 1..15: mol_type = other DNA
agctatagcatgaac

SEQ ID NO: 31 - protein, 5 aa, synthetic construct
  REGION 1..5: note = IGHV3-21*01 heavy chain variable complementarity determining regions 1 (CDR1) sequence
SYSMN

SEQ ID NO: 32 - DNA, 42 bp, synthetic construct
  misc_feature 1..42: note = IGHV3-21*01 heavy chain variable framework region 2 (FWR2) sequence
  source 1..42: mol_type = other DNA
tgggtccgccaggctccagggaaggggctggagtgggtctca

SEQ ID NO: 33 - protein, 14 aa, synthetic construct
  REGION 1..14: note = IGHV3-21*01 heavy chain variable framework region 2 (FWR2) sequence
WVRQAPGKGLEWVS

SEQ ID NO: 34 - DNA, 51 bp, synthetic construct
  misc_feature 1..51: note = IGHV3-21*01 heavy chain variable complementarity determining regions 2 (CDR2) sequence
  source 1..51: mol_type = other DNA
tccattagtagtagtagtagttacatatactacgcagactcagtgaagggc

SEQ ID NO: 35 - protein, 17 aa, synthetic construct
  REGION 1..17: note = IGHV3-21*01 heavy chain variable complementarity determining regions 2 (CDR2) sequence
SISSSSSYIYYADSVKG

SEQ ID NO: 36 - DNA, 96 bp, synthetic construct
  misc_feature 1..96: note = IGHV3-21*01 heavy chain variable framework region 3 (FWR3) sequence
  source 1..96: mol_type = other DNA
cgattcaccatctccagagacaacgccaagaactcactgtatctgcaaatgaacagcctgagagccgaggacacggctgtgtattactgtgcgaga

SEQ ID NO: 37 - protein, 32 aa, synthetic construct
  REGION 1..32: note = IGHV3-21*01 heavy chain variable framework region 3 (FWR3) sequence
RFTISRDNAKNSLYLQMNSLRAEDTAVYYCAR

SEQ ID NO: 38 - DNA, 366 bp, synthetic construct
  misc_feature 1..366: note = Humanized E6 heavy chain variable region sequence
  source 1..366: mol_type = other DNA
gaggtgcagctggtggagtctgggggaggcctggtcaagcctggggggtccctgagactctcctgtgcagcctctggattcaccttcagtaggtatggcatgagctgggtccgccaggctccagggaagaggctggagtgggtctcaaccattagtggcggaggcacctacatatactacccagactcagtgaagggccgattcaccatctccagagacaacgccaagaacaccctgtatctgcaaatgaacagcctgagagccgaggacacggctgtgtattactgtaccagagataactatggccgcaactatgattatggcatggattattggggccagggcaccctggtgaccgtgagcagc

SEQ ID NO: 39 - protein, 122 aa, synthetic construct
  REGION 1..122: note = Humanized E6 heavy chain variable region sequence
EVQLVESGGGLVKPGGSLRLSCAASGFTFSRYGMSWVRQAPGKRLEWVSTISGGGTYIYYPDSVKGRFTISRDNAKNTLYLQMNSLRAEDTAVYYCTRDNYGRNYDYGMDYWGQGTLVTVSS

SEQ ID NO: 40 - DNA, 90 bp, synthetic construct; identical to SEQ ID NO: 28
  misc_feature 1..90: note = Humanized E6 heavy chain variable framework region 1 (FWR1) acid sequence
  source 1..90: mol_type = other DNA

SEQ ID NO: 41 - protein, 30 aa, synthetic construct; identical to SEQ ID NO: 29
  REGION 1..30: note = Humanized E6 heavy chain variable framework region 1 (FWR1) acid sequence

SEQ ID NO: 42 - DNA, 15 bp, synthetic construct
  misc_feature 1..15: note = Humanized E6 heavy chain variable complementarity determining regions 1 (CDR1) sequence
  source 1..15: mol_type = other DNA
aggtatggcatgagc

SEQ ID NO: 43 - protein, 5 aa, synthetic construct
  REGION 1..5: note = Humanized E6 heavy chain variable complementarity determining regions 1 (CDR1) sequence
RYGMS

SEQ ID NO: 44 - DNA, 42 bp, synthetic construct
  misc_feature 1..42: note = Humanized E6 heavy chain variable framework region 2 (FWR2) acid sequence
  source 1..42: mol_type = other DNA
tgggtccgccaggctccagggaagaggctggagtgggtctca

SEQ ID NO: 45 - protein, 14 aa, synthetic construct
  REGION 1..14: note = Humanized E6 heavy chain variable framework region 2 (FWR2) acid sequence
WVRQAPGKRLEWVS

SEQ ID NO: 46 - DNA, 51 bp, synthetic construct
  misc_feature 1..51: note = Humanized E6 heavy chain variable complementarity determining regions 2 (CDR2) sequence
  source 1..51: mol_type = other DNA
accattagtggcggaggcacctacatatactacccagactcagtgaagggc

SEQ ID NO: 47 - protein, 17 aa, synthetic construct
  REGION 1..17: note = Humanized E6 heavy chain variable complementarity determining regions 2 (CDR2) sequence
TISGGGTYIYYPDSVKG

SEQ ID NO: 48 - DNA, 96 bp, synthetic construct
  misc_feature 1..96: note = Humanized E6 heavy chain variable framework region 3 (FWR3) acid sequence
  source 1..96: mol_type = other DNA
cgattcaccatctccagagacaacgccaagaacaccctgtatctgcaaatgaacagcctgagagccgaggacacggctgtgtattactgtaccaga

SEQ ID NO: 49 - protein, 32 aa, synthetic construct
  REGION 1..32: note = Humanized E6 heavy chain variable framework region 3 (FWR3) acid sequence
RFTISRDNAKNTLYLQMNSLRAEDTAVYYCTR

SEQ ID NO: 50 - DNA, 39 bp, synthetic construct
  misc_feature 1..39: note = Humanized E6 heavy chain variable complementarity determining regions 3 (CDR3) sequence
  source 1..39: mol_type = other DNA
gataactatggccgcaactatgattatggcatggattat

SEQ ID NO: 51 - protein, 13 aa, synthetic construct
  REGION 1..13: note = Humanized E6 heavy chain variable complementarity determining regions 3 (CDR3) sequence
DNYGRNYDYGMDY

SEQ ID NO: 52 - DNA, 1442 bp, synthetic construct
  misc_feature 1..1442: note = Humanized E6 IgG2 heavy chain synthesized by Genescript
  source 1..1442: mol_type = other DNA
gaattctaagcttgggccaccatggaactggggctccgctgggttttccttgttgctattttagaaggtgtccagtgtgaggtgcagctggtggagtctgggggaggcctggtcaagcctggggggtccctgagactctcctgtgcagcctctggattcaccttcagtaggtatggcatgagctgggtccgccaggctccagggaagaggctggagtgggtctcaaccattagtggcggaggcacctacatatactacccagactcagtgaagggccgattcaccatctccagagacaacgccaagaacaccctgtatctgcaaatgaacagcctgagagccgaggacacggctgtgtattactgtaccagagataactatggccgcaactatgattatggcatggattattggggccagggcaccctggtgaccgtgagcagcgcctccaccaagggcccatcggtcttccccctggcgccctgctccaggagcacctccgagagcacagccgccctgggctgcctggtcaaggactacttccccgaaccggtgacggtgtcgtggaactcaggcgctctgaccagcggcgtgcacaccttcccagctgtcctacagtcctcaggactctactccctcagcagcgtggtgaccgtgccctccagcaacttcggcacccagacctacacctgcaacgtagatcacaagcccagcaacaccaaggtggacaagacagttgagcgcaaatgttgtgtcgagtgcccaccgtgcccagcaccacctgtggcaggaccgtcagtcttcctcttccccccaaaacccaaggacaccctcatgatctcccggacccctgaggtcacgtgcgtggtggtggacgtgagccacgaagaccccgaggtccagttcaactggtacgtggacggcgtggaggtgcataatgccaagacaaagccacgggaggagcagttcaacagcacgttccgtgtggtcagcgtcctcaccgttgtgcaccaggactggctgaacggcaaggagtacaagtgcaaggtctccaacaaaggcctcccagcccccatcgagaaaaccatctccaaaaccaaagggcagccccgagaaccacaggtgtacaccctgcccccatcccgggaggagatgaccaagaaccaggtcagcctgacctgcctggtcaaaggcttctaccccagcgacatcgccgtggagtgggagagcaatgggcagccggagaacaactacaagaccacacctcccatgctggactccgacggctccttcttcctctacagcaagctcaccgtggacaagagcaggtggcagcaggggaacgtcttctcatgctccgtgatgcatgaggctctgcacaaccactacacgcagaagagcctctccctgtctccgggtaaatagtaagtttaaactctaga

SEQ ID NO: 53 - protein, 477 aa, synthetic construct
  REGION 1..477: note = Humanized E6 IgG2 heavy chain synthesized by Genescript
  VARIANT 477: note = misc_feature - Xaa can be any naturally occurring amino acid
EFAWATMELGLRWVFLVAILEGVQCEVQLVESGGGLVKPGGSLRLSCAASGFTFSRYGMSWVRQAPGKRLEWVSTISGGGTYIYYPDSVKGRFTISRDNAKNTLYLQMNSLRAEDTAVYYCTRDNYGRNYDYGMDYWGQGTLVTVSSASTKGPSVFPLAPCSRSTSESTAALGCLVKDYFPEPVTVSWNSGALTSGVHTFPAVLQSSGLYSLSSVVTVPSSNFGTQTYTCNVDHKPSNTKVDKTVERKCCVECPPCPAPPVAGPSVFLFPPKPKDTLMISRTPEVTCVVVDVSHEDPEVQFNWYVDGVEVHNAKTKPREEQFNSTFRVVSVLTVVHQDWLNGKEYKCKVSNKGLPAPIEKTISKTKGQPREPQVYTLPPSREEMTKNQVSLTCLVKGFYPSDIAVEWESNGQPENNYKTTPPMLDSDGSFFLYSKLTVDKSRWQQGNVFSCSVMHEALHNHYTQKSLSLSPGKVTLX

SEQ ID NO: 54 - DNA, 981 bp, synthetic construct
  misc_feature 1..981: note = Human IgG2 heavy chain constant region sequence
  source 1..981: mol_type = other DNA
gcctccaccaagggcccatcggtcttccccctggcgccctgctccaggagcacctccgagagcacagccgccctgggctgcctggtcaaggactacttccccgaaccggtgacggtgtcgtggaactcaggcgctctgaccagcggcgtgcacaccttcccagctgtcctacagtcctcaggactctactccctcagcagcgtggtgaccgtgccctccagcaacttcggcacccagacctacacctgcaacgtagatcacaagcccagcaacaccaaggtggacaagacagttgagcgcaaatgttgtgtcgagtgcccaccgtgcccagcaccacctgtggcaggaccgtcagtcttcctcttccccccaaaacccaaggacaccctcatgatctcccggacccctgaggtcacgtgcgtggtggtggacgtgagccacgaagaccccgaggtccagttcaactggtacgtggacggcgtggaggtgcataatgccaagacaaagccacgggaggagcagttcaacagcacgttccgtgtggtcagcgtcctcaccgttgtgcaccaggactggctgaacggcaaggagtacaagtgcaaggtctccaacaaaggcctcccagcccccatcgagaaaaccatctccaaaaccaaagggcagccccgagaaccacaggtgtacaccctgcccccatcccgggaggagatgaccaagaaccaggtcagcctgacctgcctggtcaaaggcttctaccccagcgacatcgccgtggagtgggagagcaatgggcagccggagaacaactacaagaccacacctcccatgctggactccgacggctccttcttcctctacagcaagctcaccgtggacaagagcaggtggcagcaggggaacgtcttctcatgctccgtgatgcatgaggctctgcacaaccactacacgcagaagagcctctccctgtctccgggtaaatag

SEQ ID NO: 55 - protein, 326 aa, synthetic construct
  REGION 1..326: note = Human IgG2 heavy chain constant region sequence
ASTKGPSVFPLAPCSRSTSESTAALGCLVKDYFPEPVTVSWNSGALTSGVHTFPAVLQSSGLYSLSSVVTVPSSNFGTQTYTCNVDHKPSNTKVDKTVERKCCVECPPCPAPPVAGPSVFLFPPKPKDTLMISRTPEVTCVVVDVSHEDPEVQFNWYVDGVEVHNAKTKPREEQFNSTFRVVSVLTVVHQDWLNGKEYKCKVSNKGLPAPIEKTISKTKGQPREPQVYTLPPSREEMTKNQVSLTCLVKGFYPSDIAVEWESNGQPENNYKTTPPMLDSDGSFFLYSKLTVDKSRWQQGNVFSCSVMHEALHNHYTQKSLSLSPGK

SEQ ID NO: 56 - DNA, 1362 bp, synthetic construct
  misc_feature 1..1362: note = Humanized E6 IgG1 heavy chain sequence
  source 1..1362: mol_type = other DNA
gaggtgcagctggtggagtctgggggaggcctggtcaagcctggggggtccctgagactctcctgtgcagcctctggattcaccttcagtaggtatggcatgagctgggtccgccaggctccagggaagaggctggagtgggtctcaaccattagtggcggaggcacctacatatactacccagactcagtgaagggccgattcaccatctccagagacaacgccaagaacccactgtatctgcaaatgaacagcctgagagccgaggacacggctgtgtattactgtcccagagataactatggccgcaactatgattatggcatggattattggggccagggcaccctggtgaccgtgagcagcgctagcaccaagggcccatcggtcttccccctggcaccctcctccaagagcacctctgggggcacagcggccctgggctgcctggtcaaggactacttccccgaaccggtgacggtgtcgtggaactcaggcgccctgaccagcggcgtgcacaccttcccggctgtcctacagtcctcaggactctactccctcagcagcgtggtgacagtgccctccagcagcttgggcacccagacctacatctgcaacgtgaatcacaagcccagcaacaccaaggtggacaagaaagttgagcccaaatcttgtgacaaaactcacacatgcccaccgtgcccagcacctgaactcctggggggaccgtcagtcttcctcttccccccaaaacccaaggacaccctcatgatctcccggacccctgaggtcacatgcgtggtggtggacgtgagccacgaagaccctgaggtcaagttcaactggtacgtggacggcgtggaggtgcataatgccaagacaaagccgcgggaggagcagtacaacagcacgtaccgtgtggtcagcgtcctcaccgtcctgcaccaggactggctgaatggcaaggagtacaagtgcaaggtctccaacaaagccctcccagcccccatcgagaaaaccatctccaaagccaaagggcagccccgagaaccacaggtgtacaccctgcccccatcccgggaggagatgaccaagaaccaggtcagcctgacctgcctggtcaaaggcttctatcccagcgacatcgccgtggagtgggagagcaatgggcagccggagaacaactacaagaccacgcctcccgtgctggactccgacggctccttcttcctctacagcaagctcaccgtggacaagagcaggtggcagcaggggaacgtcttctcatgctccgtgatgcatgaggctctgcacaaccactacacgcagaagagcctctccctgtctccgggtaaatgataa

SEQ ID NO: 57 - protein, 452 aa, synthetic construct
  REGION 1..452: note = Humanized E6 IgG1 heavy chain sequence
EVQLVESGGGLVKPGGSLRLSCAASGFTFSRYGMSWVRQAPGKRLEWVSTISGGGTYIYYPDSVKGRFTISRDNAKNPLYLQMNSLRAEDTAVYYCPRDNYGRNYDYGMDYWGQGTLVTVSSASTKGPSVFPLAPSSKSTSGGTAALGCLVKDYFPEPVTVSWNSGALTSGVHTFPAVLQSSGLYSLSSVVTVPSSSLGTQTYICNVNHKPSNTKVDKKVEPKSCDKTHTCPPCPAPELLGGPSVFLFPPKPKDTLMISRTPEVTCVVVDVSHEDPEVKFNWYVDGVEVHNAKTKPREEQYNSTYRVVSVLTVLHQDWLNGKEYKCKVSNKALPAPIEKTISKAKGQPREPQVYTLPPSREEMTKNQVSLTCLVKGFYPSDIAVEWESNGQPENNYKTTPPVLDSDGSFFLYSKLTVDKSRWQQGNVFSCSVMHEALHNHYTQKSLSLSPGK

SEQ ID NO: 58 - DNA, 996 bp, synthetic construct
  misc_feature 1..996: note = Human IgG1 heavy chain constant region sequence
  source 1..996: mol_type = other DNA
gctagcaccaagggcccatcggtcttccccctggcaccctcctccaagagcacctctgggggcacagcggccctgggctgcctggtcaaggactacttccccgaaccggtgacggtgtcgtggaactcaggcgccctgaccagcggcgtgcacaccttcccggctgtcctacagtcctcaggactctactccctcagcagcgtggtgacagtgccctccagcagcttgggcacccagacctacatctgcaacgtgaatcacaagcccagcaacaccaaggtggacaagaaagttgagcccaaatcttgtgacaaaactcacacatgcccaccgtgcccagcacctgaactcctggggggaccgtcagtcttcctcttccccccaaaacccaaggacaccctcatgatctcccggacccctgaggtcacatgcgtggtggtggacgtgagccacgaagaccctgaggtcaagttcaactggtacgtggacggcgtggaggtgcataatgccaagacaaagccgcgggaggagcagtacaacagcacgtaccgtgtggtcagcgtcctcaccgtcctgcaccaggactggctgaatggcaaggagtacaagtgcaaggtctccaacaaagccctcccagcccccatcgagaaaaccatctccaaagccaaagggcagccccgagaaccacaggtgtacaccctgcccccatcccgggaggagatgaccaagaaccaggtcagcctgacctgcctggtcaaaggcttctatcccagcgacatcgccgtggagtgggagagcaatgggcagccggagaacaactacaagaccacgcctcccgtgctggactccgacggctccttcttcctctacagcaagctcaccgtggacaagagcaggtggcagcaggggaacgtcttctcatgctccgtgatgcatgaggctctgcacaaccactacacgcagaagagcctctccctgtctccgggtaaatgataa

SEQ ID NO: 59 - protein, 330 aa, synthetic construct
  REGION 1..330: note = Human IgG1 heavy chain constant region sequence
ASTKGPSVFPLAPSSKSTSGGTAALGCLVKDYFPEPVTVSWNSGALTSGVHTFPAVLQSSGLYSLSSVVTVPSSSLGTQTYICNVNHKPSNTKVDKKVEPKSCDKTHTCPPCPAPELLGGPSVFLFPPKPKDTLMISRTPEVTCVVVDVSHEDPEVKFNWYVDGVEVHNAKTKPREEQYNSTYRVVSVLTVLHQDWLNGKEYKCKVSNKALPAPIEKTISKAKGQPREPQVYTLPPSREEMTKNQVSLTCLVKGFYPSDIAVEWESNGQPENNYKTTPPVLDSDGSFFLYSKLTVDKSRWQQGNVFSCSVMHEALHNHYTQKSLSLSPGK

SEQ ID NO: 60 - DNA, 560 bp, synthetic construct
  misc_feature 1..560: note = Human IgG1 heavy chain constant region gBLOCK#1 sequence
  source 1..560: mol_type = other DNA
atggcatggattattggggccagggcaccctggtgaccgtgagcagcgctagcaccaagggcccatcggtcttccccctggcaccctcctccaagagcacctctgggggcacagcggccctgggctgcctggtcaaggactacttccccgaaccggtgacggtgtcgtggaactcaggcgccctgaccagcggcgtgcacaccttcccggctgtcctacagtcctcaggactctactccctcagcagcgtggtgacagtgccctccagcagcttgggcacccagacctacatctgcaacgtgaatcacaagcccagcaacaccaaggtggacaagaaagttgagcccaaatcttgtgacaaaactcacacatgcccaccgtgcccagcacctgaactcctggggggaccgtcagtcttcctcttccccccaaaacccaaggacaccctcatgatctcccggacccctgaggtcacatgcgtggtggtggacgtgagccacgaagaccctgaggtcaagttcaactggtacgtggacggcgtggaggtgcataatgccaag

SEQ ID NO: 61 - DNA, 557 bp, synthetic construct
  misc_feature 1..557: note = Human IgG1 heavy chain constant region gBLOCK#2 sequence
  source 1..557: mol_type = other DNA
tacgtggacggcgtggaggtgcataatgccaagacaaagccgcgggaggagcagtacaacagcacgtaccgtgtggtcagcgtcctcaccgtcctgcaccaggactggctgaatggcaaggagtacaagtgcaaggtctccaacaaagccctcccagcccccatcgagaaaaccatctccaaagccaaagggcagccccgagaaccacaggtgtacaccctgcccccatcccgggaggagatgaccaagaaccaggtcagcctgacctgcctggtcaaaggcttctatcccagcgacatcgccgtggagtgggagagcaatgggcagccggagaacaactacaagaccacgcctcccgtgctggactccgacggctccttcttcctctacagcaagctcaccgtggacaagagcaggtggcagcaggggaacgtcttctcatgctccgtgatgcatgaggctctgcacaaccactacacgcagaagagcctctccctgtctccgggtaaatgataagtttaaacccgctgatcagcctcgactgtgccttctagttg

SEQ ID NO: 62 - DNA, 31 bp, synthetic construct
  misc_feature 1..31: note = E6 heavy chain variable region overlapping sequence
  source 1..31: mol_type = other DNA
atggcatggattattggggccagggcaccct

SEQ ID NO: 63 - DNA, 33 bp, synthetic construct
  misc_feature 1..33: note = IgG1 heavy chain constant region overlapping region sequence
  source 1..33: mol_type = other DNA
tacgtggacggcgtggaggtgcataatgccaag

SEQ ID NO: 64 - DNA, 33 bp, synthetic construct
  misc_feature 1..33: note = pCDNA3.1 V5 and pSECTag2 overlapping sequence
  source 1..33: mol_type = other DNA
ccgctgatcagcctcgactgtgccttctagttg

SEQ ID NO: 65 - DNA, 318 bp, synthetic construct
  misc_feature 1..318: note = Mouse E6 Light Chain variable region sequence
  source 1..318: mol_type = other DNA
caaattgttctcacccagtctccagcaatcatgtctgcatctccaggggaggaggtcaccctaacctgcagtgccacctcaagtgtaagttacatacactggttccagcagaggccaggcacttctcccaaactctggatttatagcacatccaacctggcttctggagtccctgttcgcttcagtggcagtggatatgggacctcttactctctcacaatcagccgaatggaggctgaagatgctgccacttattactgccagcaaaggagtagttccccattcacgttcggctcggggacaaagttggaaataaaa

SEQ ID NO: 66 - protein, 106 aa, synthetic construct
  REGION 1..106: note = Mouse E6 Light Chain variable region sequence
QIVLTQSPAIMSASPGEEVTLTCSATSSVSYIHWFQQRPGTSPKLWIYSTSNLASGVPVRFSGSGYGTSYSLTISRMEAEDAATYYCQQRSSSPFTFGSGTKLEIK

SEQ ID NO: 67 - DNA, 69 bp, synthetic construct
  misc_feature 1..69: note = Mouse E6 light chain variable framework region 1 (FWR1) sequence
  source 1..69: mol_type = other DNA
caaattgttctcacccagtctccagcaatcatgtctgcatctccaggggaggaggtcaccctaacctgc

SEQ ID NO: 68 - protein, 23 aa, synthetic construct
  REGION 1..23: note = Mouse E6 light chain variable framework region 1 (FWR1) sequence
QIVLTQSPAIMSASPGEEVTLTC

SEQ ID NO: 69 - DNA, 30 bp, synthetic construct
  misc_feature 1..30: note = Mouse E6 light chain variable complementarity determining regions 1 (CDR1) sequence
  source 1..30: mol_type = other DNA
agtgccacctcaagtgtaagttacatacac

SEQ ID NO: 70 - protein, 10 aa, synthetic construct
  REGION 1..10: note = Mouse E6 light chain variable complementarity determining regions 1 (CDR1) sequence
SATSSVSYIH

SEQ ID NO: 71 - DNA, 45 bp, synthetic construct
  misc_feature 1..45: note = Mouse E6 light chain variable framework region 2 (FWR2) sequence
  source 1..45: mol_type = other DNA
tggttccagcagaggccaggcacttctcccaaactctggatttat

SEQ ID NO: 72 - protein, 15 aa, synthetic construct
  REGION 1..15: note = Mouse E6 light chain variable framework region 2 (FWR2) sequence
WFQQRPGTSPKLWIY

SEQ ID NO: 73 - DNA, 21 bp, synthetic construct
  misc_feature 1..21: note = Mouse E6 light chain variable complementarity determining regions 2 (CDR2) sequence
  source 1..21: mol_type = other DNA
agcacatccaacctggcttct

SEQ ID NO: 74 - protein, 7 aa, synthetic construct
  REGION 1..7: note = Mouse E6 light chain variable complementarity determining regions 2 (CDR2) sequence
STSNLAS

SEQ ID NO: 75 - DNA, 96 bp, synthetic construct
  misc_feature 1..96: note = Mouse E6 light chain variable framework region 3 (FWR3) sequence
  source 1..96: mol_type = other DNA
ggagtccctgttcgcttcagtggcagtggatatgggacctcttactctctcacaatcagccgaatggaggctgaagatgctgccacttattactgc

SEQ ID NO: 76 - protein, 32 aa, synthetic construct
  REGION 1..32: note = Mouse E6 light chain variable framework region 3 (FWR3) sequence
GVPVRFSGSGYGTSYSLTISRMEAEDAATYYC

SEQ ID NO: 77 - DNA, 27 bp, synthetic construct
  misc_feature 1..27: note = Mouse E6 light chain variable complementarity determining regions 3 (CDR3) sequence
  source 1..27: mol_type = other DNA
cagcaaaggagtagttccccattcacg

SEQ ID NO: 78 - protein, 9 aa, synthetic construct
  REGION 1..9: note = Mouse E6 light chain variable complementarity determining regions 3 (CDR3) sequence
QQRSSSPFT

SEQ ID NO: 79 - DNA, 287 bp, synthetic construct
  misc_feature 1..287: note = IGKV3-11*02 light chain variable region sequence
  source 1..287: mol_type = other DNA
gaaattgtgttgacacagtctccagccaccctgtctttgtctccaggggaaagagccaccctctcctgcagggccagtcagagtgttagcagctacttagcctggtaccaacagaaacctggccaggctcccaggctcctcatctatgatgcatccaacagggccactggcatcccagccaggttcagtggcagtgggtctgggagagacttcactctcaccatcagcagcctagagcctgaagattttgcagtttattactgtcagcagcgtagcaactggcctcc

SEQ ID NO: 80 - protein, 96 aa, synthetic construct
  REGION 1..96: note = IGKV3-11*02 light chain variable region sequence
EIVLTQSPATLSLSPGERATLSCRASQSVSSYLAWYQQKPGQAPRLLIYDASNRATGIPARFSGSGSGRDFTLTISSLEPEDFAVYYCQQRSNWPP

SEQ ID NO: 81 - DNA, 69 bp, synthetic construct
  misc_feature 1..69: note = IGKV3-11*02 light chain variable framework region 1 (FWR1) acid sequence
  source 1..69: mol_type = other DNA
gaaattgtgttgacacagtctccagccaccctgtctttgtctccaggggaaagagccaccctctcctgc

SEQ ID NO: 82 - protein, 23 aa, synthetic construct
  REGION 1..23: note = IGKV3-11*02 light chain variable framework region 1 (FWR1) acid sequence
EIVLTQSPATLSLSPGERATLSC

SEQ ID NO: 83 - DNA, 33 bp, synthetic construct
  misc_feature 1..33: note = IGKV3-11*02 light chain variable complementarity determining regions 1 (CDR1) sequence
  source 1..33: mol_type = other DNA
agggccagtcagagtgttagcagctacttagcc

SEQ ID NO: 84 - protein, 11 aa, synthetic construct
  REGION 1..11: note = IGKV3-11*02 light chain variable complementarity determining regions 1 (CDR1) sequence
RASQSVSSYLA

SEQ ID NO: 85 - DNA, 45 bp, synthetic construct
  misc_feature 1..45: note = IGKV3-11*02 light chain variable framework region 2 (FWR2) sequence
  source 1..45: mol_type = other DNA
tggtaccaacagaaacctggccaggctcccaggctcctcatctat

SEQ ID NO: 86 - protein, 15 aa, synthetic construct
  REGION 1..15: note = IGKV3-11*02 light chain variable framework region 2 (FWR2) sequence
WYQQKPGQAPRLLIY

SEQ ID NO: 87 - DNA, 21 bp, synthetic construct
  misc_feature 1..21: note = IGKV3-11*02 light chain variable complementarity determining regions 2 (CDR2) sequence
  source 1..21: mol_type = other DNA
gatgcatccaacagggccact

SEQ ID NO: 88 - protein, 7 aa, synthetic construct
  REGION 1..7: note = IGKV3-11*02 light chain variable complementarity determining regions 2 (CDR2) sequence
DASNRAT

SEQ ID NO: 89 - DNA, 96 bp, synthetic construct
  misc_feature 1..96: note = IGKV3-11*02 light chain variable framework region 3 (FWR3) sequence
  source 1..96: mol_type = other DNA
ggcatcccagccaggttcagtggcagtgggtctgggagagacttcactctcaccatcagcagcctagagcctgaagattttgcagtttattactgt

SEQ ID NO: 90 - protein, 32 aa, synthetic construct
  REGION 1..32: note = IGKV3-11*02 light chain variable framework region 3 (FWR3) sequence
GIPARFSGSGSGTDFTLTISSLEPEDFAVYYC

SEQ ID NO: 91 - DNA, 23 bp, synthetic construct
  misc_feature 1..23: note = IGKV3-11*02 light chain variable complementarity determining regions3 (CDR3) sequence
  source 1..23: mol_type = other DNA
cagcagcgtagcaactggcctcc

SEQ ID NO: 92 - protein, 8 aa, synthetic construct
  REGION 1..8: note = IGKV3-11*02 light chain variable complementarity determining regions3 (CDR3) sequence
QQRSNWPP

SEQ ID NO: 93 - DNA, 318 bp, synthetic construct
  misc_feature 1..318: note = Humanized E6 light chain variable region sequence
  source 1..318: mol_type = other DNA
gaaattgtgttgacacagtctccagccaccctgtctttgtctccaggggaaagagccaccctcacctgcagcgccaccagcagtgttagctacatccactggtaccaacagaggcctggccagagccccaggctcctcatctatagcacctccaacctggccagcggcatcccagccaggttcagtggcagtgggtctgggagcgactacactctcaccatcagcagcctagagcctgaagattttgcagtttattactgtcagcagcgtagcagctcccctttcacctttggcagcggcaccaaagtggaaattaaa

SEQ ID NO: 94 - protein, 106 aa, synthetic construct
  REGION 1..106: note = Humanized E6 light chain variable region sequence
EIVLTQSPATLSLSPGERATLTCSATSSVSYIHWYQQRPGQSPRLLIYSTSNLASGIPARFSGSGSGSDYTLTISSLEPEDFAVYYCQQRSSSPFTFGSGTKVEIK

SEQ ID NO: 95 - DNA, 69 bp, synthetic construct
  misc_feature 1..69: note = Humanized E6 light chain variable framework region 1 (FWR1) acid sequence
  source 1..69: mol_type = other DNA
gaaattgtgttgacacagtctccagccaccctgtctttgtctccaggggaaagagccaccctcacctgc

SEQ ID NO: 96 - protein, 23 aa, synthetic construct
  REGION 1..23: note = Humanized E6 light chain variable framework region 1 (FWR1) acid sequence
EIVLTQSPATLSLSPGERATLTC

SEQ ID NO: 97 - DNA, 30 bp, synthetic construct
  misc_feature 1..30: note = Humanized E6 light chain variable complementarity determining regions 1 (CDR1) sequence
  source 1..30: mol_type = other DNA
agcgccaccagcagtgttagctacatccac

SEQ ID NO: 98 - protein, 10 aa, synthetic construct
  REGION 1..10: note = Humanized E6 light chain variable complementarity determining regions 1 (CDR1) sequence
SATSSVSYIH

SEQ ID NO: 99 - DNA, 45 bp, synthetic construct
  misc_feature 1..45: note = Humanized E6 heavy light variable framework region 2 (FWR2) acid sequence
  source 1..45: mol_type = other DNA
tggtaccaacagaggcctggccagagccccaggctcctcatctat

SEQ ID NO: 100 - protein, 15 aa, synthetic construct
  REGION 1..15: note = Humanized E6 heavy light variable framework region 2 (FWR2) acid sequence
WYQQRPGQSPRLLIY

SEQ ID NO: 101 - DNA, 21 bp, synthetic construct
  misc_feature 1..21: note = Humanized E6 light chain variable complementarity determining regions 2 (CDR2) sequence
  source 1..21: mol_type = other DNA
agcacctccaacctggccagc

SEQ ID NO: 102 - protein, 7 aa, synthetic construct
  REGION 1..7: note = Humanized E6 light chain variable complementarity determining regions 2 (CDR2) sequence
STSNLAS

SEQ ID NO: 103 - DNA, 96 bp, synthetic construct
  misc_feature 1..96: note = Humanized E6 light chain variable framework region 3 (FWR3) acid sequence
  source 1..96: mol_type = other DNA
ggcatcccagccaggttcagtggcagtgggtctgggagcgactacactctcaccatcagcagcctagagcctgaagattttgcagtttattactgt

SEQ ID NO: 104 - protein, 32 aa, synthetic construct
  REGION 1..32: note = Humanized E6 light chain variable framework region 3 (FWR3) acid sequence
GIPARFSGSGSGSDYTLTISSLEPEDFAVYYC

SEQ ID NO: 105 - DNA, 27 bp, synthetic construct
  misc_feature 1..27: note = Humanized E6 light chain variable complementarity determining regions 3 (CDR3) sequence
  source 1..27: mol_type = other DNA
cagcagcgtagcagctcccctttcacc

SEQ ID NO: 106 - protein, 9 aa, synthetic construct
  REGION 1..9: note = Humanized E6 light chain variable complementarity determining regions 3 (CDR3) sequence
QQRSSSPFT

SEQ ID NO: 107 - DNA, 740 bp, synthetic construct
  misc_feature 1..740: note = Humanized E6 Kappa light chain synthesized by Genescript
  source 1..740: mol_type = other DNA
gaattctaagcttgggccaccatggaagccccagcgcagcttctcttcctcctgctactctggctcccagataccactggagaaattgtgttgacacagtctccagccaccctgtctttgtctccaggggaaagagccaccctcacctgcagcgccaccagcagtgttagctacatccactggtaccaacagaggcctggccagagccccaggctcctcatctatagcacctccaacctggccagcggcatcccagccaggttcagtggcagtgggtctgggagcgactacactctcaccatcagcagcctagagcctgaagattttgcagtttattactgtcagcagcgtagcagctcccctttcacctttggcagcggcaccaaagtggaaattaaaaggacggtggctgcaccatctgtcttcatcttcccgccatctgatgagcagttgaaatctggaactgcctctgttgtgtgcctgctgaataacttctatcccagagaggccaaagtacagtggaaggtggataacgccctccaatcgggtaactcccaggagagtgtcacagagcaggacagcaaggacagcacctacagcctcagcagcaccctgacgctgagcaaagcagactacgagaaacacaaagtctacgcctgcgaagtcacccatcagggcctgagctcgcccgtcacaaagagcttcaacaggggagagtgttagtaagtttaaactctaga

SEQ ID NO: 108 - protein, 243 aa, synthetic construct
  REGION 1..243: note = Humanized E6 Kappa light chain synthesized by Genescript
  VARIANT 243: note = misc_feature - Xaa can be any naturally occurring amino acid
EFAWATMEAPAQLLFLLLLWLPDTTGEIVLTQSPATLSLSPGERATLTCSATSSVSYIHWYQQRPGQSPRLLIYSTSNLASGIPARFSGSGSGSDYTLTISSLEPEDFAVYYCQQRSSSPFTFGSGTKVEIKRTVAAPSVFIFPPSDEQLKSGTASVVCLLNNFYPREAKVQWKVDNALQSGNSQESVTEQDSKDSTYSLSSTLTLSKADYEKHKVYACEVTHQGLSSPVTKSFNRGECVTLX

SEQ ID NO: 109 - DNA, 324 bp, synthetic construct
  misc_feature 1..324: note = Human Kappa light chain constant region sequence
  source 1..324: mol_type = other DNA
aggacggtggctgcaccatctgtcttcatcttcccgccatctgatgagcagttgaaatctggaactgcctctgttgtgtgcctgctgaataacttctatcccagagaggccaaagtacagtggaaggtggataacgccctccaatcgggtaactcccaggagagtgtcacagagcaggacagcaaggacagcacctacagcctcagcagcaccctgacgctgagcaaagcagactacgagaaacacaaagtctacgcctgcgaagtcacccatcagggcctgagctcgcccgtcacaaagagcttcaacaggggagagtgttag

SEQ ID NO: 110 - protein, 107 aa, synthetic construct [sequence omitted]

SEQ ID NO: 111 - DNA, 642 bp, synthetic construct
  misc_feature 1..642: note = Humanized E6 lambda light chain sequence
  source 1..642: mol_type = other DNA
gaaattgtgttgacacagtctccagccaccctgtctttgtctccaggggaaagagccaccctcacctgcagcgccaccagcagtgttagctacatccactggtaccaacagaggcctggccagagccccaggctcctcatctatagcacctccaacctggccagcggcatcccagccaggttcagtggcagtgggtctgggagcgactacactctcaccatcagcagcctagagcctgaagattttgcagtttattactgtcagcagcgtagcagctcccctttcacctttggcagcggcaccaaagtggaaattaaaggtcagcccaaggctgccccctcggtcactctgttcccgccctcctctgaggagcttcaagccaacaaggccacactggtgtgtctcataagtgacttctacccgggagccgtgacagtggcctggaaggcagatagcagccccgtcaaggcgggagtggagaccaccacaccctccaaacaaagcaacaacaagtacgcggccagcagctatctgagcctgacgcctgagcagtggaagtcccacagaagctacagctgccaggtcacgcatgaagggagcaccgtggagaagacagtggcccctacagaatgttcatagtaa

SEQ ID NO: 112 - protein, 212 aa, synthetic construct
  REGION 1..212: note = Humanized E6 lambda light chain sequence
EIVLTQSPATLSLSPGERATLTCSATSSVSYIHWYQQRPGQSPRLLIYSTSNLASGIPARFSGSGSGSDYTLTISSLEPEDFAVYYCQQRSSSPFTFGSGTKVEIKGQPKAAPSVTLFPPSSEELQANKATLVCLISDFYPGAVTVAWKADSSPVKAGVETTTPSKQSNNKYAASSYLSLTPEQWKSHRSYSCQVTHEGSTVEKTVAPTECS

SEQ ID NO: 113 - DNA, 324 bp, synthetic construct
  misc_feature 1..324: note = Humanized lambda light chain constant region sequence
  source 1..324: mol_type = other DNA
ggtcagcccaaggctgccccctcggtcactctgttcccgccctcctctgaggagcttcaagccaacaaggccacactggtgtgtctcataagtgacttctacccgggagccgtgacagtggcctggaaggcagatagcagccccgtcaaggcgggagtggagaccaccacaccctccaaacaaagcaacaacaagtacgcggccagcagctatctgagcctgacgcctgagcagtggaagtcccacagaagctacagctgccaggtcacgcatgaagggagcaccgtggagaagacagtggcccctacagaatgttcatagtaa

SEQ ID NO: 114 - protein, 106 aa, synthetic construct
  REGION 1..106: note = Humanized lambda light chain constant region sequence
GQPKAAPSVTLFPPSSEELQANKATLVCLISDFYPGAVTVAWKADSSPVKAGVETTTPSKQSNNKYAASSYLSLTPEQWKSHRSYSCQVTHEGSTVEKTVAPTECS

SEQ ID NO: 115 - DNA, 614 bp, synthetic construct
  misc_feature 1..614: note = Human lambda light chain constant region gBLOCK#3 sequence
  source 1..614: mol_type = other DNA
agcgccaccagcagtgttagctacatccactggtaccaacagaggcctggccagagccccaggctcctcatctatagcacctccaacctggccagcggcatcccagccaggttcagtggcagtgggtctgggagcgactacactctcaccatcagcagcctagagcctgaagattttgcagtttattactgtcagcagcgtagcagctcccctttcacctttggcagcggcaccaaagtggaaattaaaggtcagcccaaggctgccccctcggtcactctgttcccgccctcctctgaggagcttcaagccaacaaggccacactggtgtgtctcataagtgacttctacccgggagccgtgacagtggcctggaaggcagatagcagccccgtcaaggcgggagtggagaccaccacaccctccaaacaaagcaacaacaagtacgcggccagcagctatctgagcctgacgcctgagcagtggaagtcccacagaagctacagctgccaggtcacgcatgaagggagcaccgtggagaagacagtggcccctacagaatgttcatagtaagtttaaacccgctgatcagcctcgactgtgccttctagttg

SEQ ID NO: 116 - DNA, 31 bp, synthetic construct
  misc_feature 1..31: note = E6 light chain variable region overlapping sequence
  source 1..31: mol_type = other DNA
agcgccaccagcagtgttagctacatccact

SEQ ID NO: 117 - DNA, 33 bp, synthetic construct; identical to SEQ ID NO: 64
  misc_feature 1..33: note = pCDNA3.1 V5 and pSECTag2 overlapping sequence
  source 1..33: mol_type = other DNA

SEQ ID NO: 118 - DNA, 390 bp, synthetic construct
  misc_feature 1..390: note = Mouse C2 heavy chain variable region sequence
  source 1..390: mol_type = other DNA
gaggtccagctggaggagtcagggggaggcttagtgaagcctggagggtccctgaaactctcctgtgcagcctctggattcactttcagtggctatgccatgtcttgggttcgccagactccggagaagaggctggagtgggtcgcaaccattagtagtggtggtacttatatctactatccagacagtgtgaaggggcgattcaccatctccagagacaatgccaagaacaccctgtacctgcaaatgagcagtctgaggtctgaggacacggccatgtattactgtgcaagacttgggggggataattactacgaatacttcgatgtctggggcgcagggaccacggtcaccgtctcctccgccaaaacgacacccccatctgtctat

SEQ ID NO: 119 - protein, 130 aa, synthetic construct
  REGION 1..130: note = Mouse C2 heavy chain variable region sequence
EVQLEESGGGLVKPGGSLKLSCAASGFTFSGYAMSWVRQTPEKRLEWVATISSGGTYIYYPDSVKGRFTISRDNAKNTLYLQMSSLRSEDTAMYYCARLGGDNYYEYFDVWGAGTTVTVSSAKTTPPSVY

SEQ ID NO: 120 - DNA, 90 bp, synthetic construct
  misc_feature 1..90: note = Mouse C2 heavy chain variable framework region 1 (FWR1) sequence
  source 1..90: mol_type = other DNA
gaggtccagctggaggagtcagggggaggcttagtgaagcctggagggtccctgaaactctcctgtgcagcctctggattcactttcagt

SEQ ID NO: 121 - protein, 30 aa, synthetic construct
  REGION 1..30: note = Mouse C2 heavy chain variable framework region 1 (FWR1) sequence
EVQLEESGGGLVKPGGSLKLSCAASGFTFS

SEQ ID NO: 122 - DNA, 15 bp, synthetic construct
  misc_feature 1..15: note = Mouse C2 heavy chain variable complementarity determining regions 1 (CDR1) sequence
  source 1..15: mol_type = other DNA
ggctatgccatgtct

SEQ ID NO: 123 - protein, 5 aa, synthetic construct
  REGION 1..5: note = Mouse C2 heavy chain variable complementarity determining regions 1 (CDR1) sequence
GYAMS

SEQ ID NO: 124 - DNA, 42 bp, synthetic construct
  misc_feature 1..42: note = Mouse C2 heavy chain variable framework region 2 (FWR2) sequence
  source 1..42: mol_type = other DNA
tgggttcgccagactccggagaagaggctggagtgggtcgca

SEQ ID NO: 125 - protein, 14 aa, synthetic construct
  REGION 1..14: note = Mouse C2 heavy chain variable framework region 2 (FWR2) sequence
WVRQTPEKRLEWVA

SEQ ID NO: 126 - DNA, 51 bp, synthetic construct
  misc_feature 1..51: note = Mouse C2 heavy chain variable complementarity determining regions 2 (CDR2) sequence
  source 1..51: mol_type = other DNA
accattagtagtggtggtacttatatctactatccagacagtgtgaagggg

SEQ ID NO: 127 - protein, 17 aa, synthetic construct
  REGION 1..17: note = Mouse C2 heavy chain variable complementarity determining regions 2 (CDR2) sequence
TISSGGTYIYYPDSVKG

SEQ ID NO: 128 - DNA, 96 bp, synthetic construct
  misc_feature 1..96: note = Mouse C2 heavy chain variable framework region 3 (FWR3) sequence
  source 1..96: mol_type = other DNA
cgattcaccatctccagagacaatgccaagaacaccctgtacctgcaaatgagcagtctgaggtctgaggacacggccatgtattactgtgcaaga

SEQ ID NO: 129 - protein, 32 aa, synthetic construct
  REGION 1..32: note = Mouse C2 heavy chain variable framework region 3 (FWR3) sequence
RFTISRDNAKNTLYLQMSSLRSEDTAMYYCAR

SEQ ID NO: 130 - DNA, 36 bp, synthetic construct
  misc_feature 1..36: note = Mouse C2 heavy chain variable complementarity determining regions 3 (CDR3) sequence
  source 1..36: mol_type = other DNA
cttgggggggataattactacgaatacttcgatgtc

SEQ ID NO: 131 - protein, 12 aa, synthetic construct
  REGION 1..12: note = Mouse C2 heavy chain variable complementarity determining regions 3 (CDR3) sequence
LGGDNYYEYFDV

SEQ ID NO: 132 - DNA, 294 bp, synthetic construct
  misc_feature 1..294: note = IGHV3-21*04 heavy chain variable region sequence
  source 1..294: mol_type = other DNA
gaggtgcagctggtggagtctgggggaggcctggtcaagcctggggggtccctgagactctcctgtgcagcctctggattcaccttcagtagctatagcatgaactgggtccgccaggctccagggaaggggctggagtgggtctcatccattagtagtagtagtagttacatatactacgcagactcagtgaagggccgattcaccatctccagagacaacgccaagaactcactgtatctgcaaatgaacagcctgagagccgaggacacggccgtgtattactgtgcgaga

SEQ ID NO: 133 - protein, 98 aa, synthetic construct; identical to SEQ ID NO: 27
  REGION 1..98: note = IGHV3-21*04 heavy chain variable region sequence

SEQ ID NO: 134 - DNA, 90 bp, synthetic construct; identical to SEQ ID NO: 28
  misc_feature 1..90: note = IGHV3-21*04 heavy chain variable framework region 1 (FWR1) sequence
  source 1..90: mol_type = other DNA

SEQ ID NO: 135 - protein, 30 aa, synthetic construct; identical to SEQ ID NO: 29
  REGION 1..30: note = IGHV3-21*04 heavy chain variable framework region 1 (FWR1) sequence

SEQ ID NO: 136 - DNA, 15 bp, synthetic construct
  misc_feature 1..15: note = IGHV3-21*04 heavy chain variable complementarity determining regions 1 (CDR1) sequence
  source 1..15: mol_type = other DNA
agctatagcatgaac

SEQ ID NO: 137 - protein, 5 aa, synthetic construct
  REGION 1..5: note = IGHV3-21*04 heavy chain variable complementarity determining regions 1 (CDR1) sequence
SYSMN

SEQ ID NO: 138 - DNA, 41 bp, synthetic construct
  misc_feature 1..41: note = IGHV3-21*04 heavy chain variable framework region 2 (FWR2) sequence
  source 1..41: mol_type = other DNA
gggtccgccaggctccagggaaggggctggagtgggtctca

SEQ ID NO: 139 - protein, 14 aa, synthetic construct
  REGION 1..14: note = IGHV3-21*04 heavy chain variable framework region 2 (FWR2) sequence
WVRQAPGKGLEWVS

SEQ ID NO: 140 - DNA, 51 bp, synthetic construct; identical to SEQ ID NO: 34
  misc_feature 1..51: note = IGHV3-21*04 heavy chain variable complementarity determining regions 2 (CDR2) sequence
  source 1..51: mol_type = other DNA

SEQ ID NO: 141 - protein, 17 aa, synthetic construct
  REGION 1..17: note = IGHV3-21*04 heavy chain variable complementarity determining regions 2 (CDR2) sequence
SISSSSSYIYYADSVKG

SEQ ID NO: 142 - DNA, 96 bp, synthetic construct
  misc_feature 1..96: note = IGHV3-21*04 heavy chain variable framework region 3 (FWR3) sequence
  source 1..96: mol_type = other DNA
cgattcaccatctccagagacaacgccaagaactcactgtatctgcaaatgaacagcctgagagccgaggacacggccgtgtattactgtgcgaga

SEQ ID NO: 143 - protein, 32 aa, synthetic construct; identical to SEQ ID NO: 37
  REGION 1..32: note = IGHV3-21*04 heavy chain variable framework region 3 (FWR3) sequence

SEQ ID NO: 144 - DNA, 363 bp, synthetic construct
  misc_feature 1..363: note = Humanized C2 heavy chain variable region sequence
  source 1..363: mol_type = other DNA
gaggtgcagctggtggagtctgggggaggcctggtcaagcctggggggtccctgagactctcctgtgcagcctctggattcaccttcagtggctatgccatgagctgggtccgccaggctccagggaaggggctggagtgggtctcaaccattagtagtggcggaacctacatatactaccccgactcagtgaagggccgattcaccatctccagagacaacgccaagaactcactgtatctgcaaatgaacagcctgagagccgaggacacggccgtgtattactgtgcgagacttgggggggataattactacgaatacttcgatgtctggggcaaagggaccacggtcaccgtctcctcc

SEQ ID NO: 145 - protein, 121 aa, synthetic construct
  REGION 1..121: note = Humanized C2 heavy chain variable region sequence
EVQLVESGGGLVKPGGSLRLSCAASGFTFSGYAMSWVRQAPGKGLEWVSTISSGGTYIYYPDSVKGRFTISRDNAKNSLYLQMNSLRAEDTAVYYCARLGGDNYYEYFDVWGKGTTVTVSS

SEQ ID NO: 146 - DNA, 90 bp, synthetic construct; identical to SEQ ID NO: 28
  misc_feature 1..90: note = Humanized C2 heavy chain variable framework region 1 (FWR1) sequence
  source 1..90: mol_type = other DNA

SEQ ID NO: 147 - protein, 30 aa, synthetic construct; identical to SEQ ID NO: 29
  REGION 1..30: note = Humanized C2 heavy chain variable framework region 1 (FWR1) sequence

SEQ ID NO: 148 - DNA, 15 bp, synthetic construct
  misc_feature 1..15: note = Humanized C2 heavy chain variable complementarity determining regions 1 (CDR1) sequence
  source 1..15: mol_type = other DNA
ggctatgccatgagc

SEQ ID NO: 149 - protein, 5 aa, synthetic construct
  REGION 1..5: note = Humanized C2 heavy chain variable complementarity determining regions 1 (CDR1) sequence
GYAMS

SEQ ID NO: 150 - DNA, 43 bp, synthetic construct
  misc_feature 1..43: note = Humanized C2 heavy chain variable framework region 2 (FWR2) sequence
  source 1..43: mol_type = other DNA
tgggtccgccaggctccagggaaggggctggagtgggtctcaa

SEQ ID NO: 151 - protein, 14 aa, synthetic construct
  REGION 1..14: note = Humanized C2 heavy chain variable framework region 2 (FWR2) sequence
WVRQAPGKGLEWVS

SEQ ID NO: 152 - DNA, 51 bp, synthetic construct
  misc_feature 1..51: note = Humanized C2 heavy chain variable complementarity determining regions 2 (CDR2) sequence
  source 1..51: mol_type = other DNA
accattagtagtggcggaacctacatatactaccccgactcagtgaagggc

SEQ ID NO: 153 - protein, 17 aa, synthetic construct
  REGION 1..17: note = Humanized C2 heavy chain variable complementarity determining regions 2 (CDR2) sequence
TISSGGTYIYYPDSVKG

SEQ ID NO: 154 - DNA, 96 bp, synthetic construct; identical to SEQ ID NO: 142
  misc_feature 1..96: note = Humanized C2 heavy chain variable framework region 3 (FWR3) sequence
  source 1..96: mol_type = other DNA

SEQ ID NO: 155 - protein, 32 aa, synthetic construct; identical to SEQ ID NO: 37
  REGION 1..32: note = Humanized C2 heavy chain variable framework region 3 (FWR3) sequence

SEQ ID NO: 156 - DNA, 36 bp, synthetic construct; identical to SEQ ID NO: 130
  misc_feature 1..36: note = Humanized C2 heavy chain variable complementarity determining regions 3 (CDR3) sequence
  source 1..36: mol_type = other DNA

SEQ ID NO: 157 - protein, 12 aa, synthetic construct
  REGION 1..12: note = Humanized C2 heavy chain variable complementarity determining regions 3 (CDR3) sequence
LGGDNYYEYFDV

SEQ ID NO: 158 - DNA, 1359 bp, synthetic construct
  misc_feature 1..1359: note = Humanized C2 IgG1 heavy chain sequence
  source 1..1359: mol_type = other DNA
gaggtgcagctggtggagtctgggggaggcctggtcaagcctggggggtccctgagactctcctgtgcagcctctggattcaccttcagtggctatgccatgagctgggtccgccaggctccagggaaggggctggagtgggtctcaaccattagtagtggcggaacctacatatactaccccgactcagtgaagggccgattcaccatctccagagacaacgccaagaactcactgtatctgcaaatgaacagcctgagagccgaggacacggccgtgtattactgtgcgagacttgggggggataattactacgaatacttcgatgtctggggcaaagggaccacggtcaccgtctcctccgctagcaccaagggcccatcggtcttccccctggcaccctcctccaagagcacctctgggggcacagcggccctgggctgcctggtcaaggactacttccccgaaccggtgacggtgtcgtggaactcaggcgccctgaccagcggcgtgcacaccttcccggctgtcctacagtcctcaggactctactccctcagcagcgtggtgacagtgccctccagcagcttgggcacccagacctacatctgcaacgtgaatcacaagcccagcaacaccaaggtggacaagaaagttgagcccaaatcttgtgacaaaactcacacatgcccaccgtgcccagcacctgaactcctggggggaccgtcagtcttcctcttccccccaaaacccaaggacaccctcatgatctcccggacccctgaggtcacatgcgtggtggtggacgtgagccacgaagaccctgaggtcaagttcaactggtacgtggacggcgtggaggtgcataatgccaagacaaagccgcgggaggagcagtacaacagcacgtaccgtgtggtcagcgtcctcaccgtcctgcaccaggactggctgaatggcaaggagtacaagtgcaaggtctccaacaaagccctcccagcccccatcgagaaaaccatctccaaagccaaagggcagccccgagaaccacaggtgtacaccctgcccccatcccgggaggagatgaccaagaaccaggtcagcctgacctgcctggtcaaaggcttctatcccagcgacatcgccgtggagtgggagagcaatgggcagccggagaacaactacaagaccacgcctcccgtgctggactccgacggctccttcttcctctacagcaagctcaccgtggacaagagcaggtggcagcaggggaacgtcttctcatgctccgtgatgcatgaggctctgcacaaccactacacgcagaagagcctctccctgtctccgggtaaatgataa

SEQ ID NO: 159 - protein, 451 aa, synthetic construct
  REGION 1..451: note = Humanized C2 IgG1 heavy chain sequence
EVQLVESGGGLVKPGGSLRLSCAASGFTFSGYAMSWVRQAPGKGLEWVSTISSGGTYIYYPDSVKGRFTISRDNAKNSLYLQMNSLRAEDTAVYYCARLGGDNYYEYFDVWGKGTTVTVSSASTKGPSVFPLAPSSKSTSGGTAALGCLVKDYFPEPVTVSWNSGALTSGVHTFPAVLQSSGLYSLSSVVTVPSSSLGTQTYICNVNHKPSNTKVDKKVEPKSCDKTHTCPPCPAPELLGGPSVFLFPPKPKDTLMISRTPEVTCVVVDVSHEDPEVKFNWYVDGVEVHNAKTKPREEQYNSTYRVVSVLTVLHQDWLNGKEYKCKVSNKALPAPIEKTISKAKGQPREPQVYTLPPSREEMTKNQVSLTCLVKGFYPSDIAVEWESNGQPENNYKTTPPVLDSDGSFFLYSKLTVDKSRWQQGNVFSCSVMHEALHNHYTQKSLSLSPGK

SEQ ID NO: 160 - DNA, 616 bp, synthetic construct
  misc_feature 1..616: note = Humanized C2 gBLOCK#4 sequence
  source 1..616: mol_type = other DNA
actcactatagggagacccaagctggctagttaagcttgggccaccatggagacagacacactcctgctatgggtactgctgctctgggttccaggttccactggtgacgaggtgcagctggtggagtctgggggaggcctggtcaagcctggggggtccctgagactctcctgtgcagcctctggattcaccttcagtggctatgccatgagctgggtccgccaggctccagggaaggggctggagtgggtctcaaccattagtagtggcggaacctacatatactaccccgactcagtgaagggccgattcaccatctccagagacaacgccaagaactcactgtatctgcaaatgaacagcctgagagccgaggacacggccgtgtattactgtgcgagacttgggggggataattactacgaatacttcgatgtctggggcaaagggaccacggtcaccgtctcctccgctagcaccaagggcccatcggtcttccccctggcaccctcctccaagagcacctctgggggcacagcggccctgggctgcctggtcaaggactacttccccgaaccggtgacggtgtcgtggaactcaggcgccctgaccagc

SEQ ID NO: 161 - DNA, 32 bp, synthetic construct
  misc_feature 1..32: note = pCDNA3.1 V5 overlapping sequence
  source 1..32: mol_type = other DNA
actcactatagggagacccaagctggctagtt

SEQ ID NO: 162 - DNA, 34 bp, synthetic construct
  misc_feature 1..34: note = Human IgG1 constant region overlapping sequence
  source 1..34: mol_type = other DNA
gacggtgtcgtggaactcaggcgccctgaccagc

SEQ ID NO: 163 - DNA, 1347 bp, synthetic construct
  misc_feature 1..1347: note = Humanized C2 IgG2 heavy chain sequence
  source 1..1347: mol_type = other DNA
gaggtgcagctggtggagtctgggggaggcctggtcaagcctggggggtccctgagactctcctgtgcagcctctggattcaccttcagtggctatgccatgagctgggtccgccaggctccagggaaggggctggagtgggtctcaaccattagtagtggcggaacctacatatactaccccgactcagtgaagggccgattcaccatctccagagacaacgccaagaactcactgtatctgcaaatgaacagcctgagagccgaggacacggccgtgtattactgtgcgagacttgggggggataattactacgaatacttcgatgtctggggcaaagggaccacggtcaccgtctcctccgcctccaccaagggcccatcggtcttccccctggcgccctgctccaggagcacctccgagagcacagccgccctgggctgcctggtcaaggactacttccccgaaccggtgacggtgtcgtggaactcaggcgctctgaccagcggcgtgcacaccttcccagctgtcctacagtcctcaggactctactccctcagcagcgtggtgaccgtgccctccagcaacttcggcacccagacctacacctgcaacgtagatcacaagcccagcaacaccaaggtggacaagacagttgagcgcaaatgttgtgtcgagtgcccaccgtgcccagcaccacctgtggcaggaccgtcagtcttcctcttccccccaaaacccaaggacaccctcatgatctcccggacccctgaggtcacgtgcgtggtggtggacgtgagccacgaagaccccgaggtccagttcaactggtacgtggacggcgtggaggtgcataatgccaagacaaagccacgggaggagcagttcaacagcacgttccgtgtggtcagcgtcctcaccgttgtgcaccaggactggctgaacggcaaggagtacaagtgcaaggtctccaacaaaggcctcccagcccccatcgagaaaaccatctccaaaaccaaagggcagccccgagaaccacaggtgtacaccctgcccccatcccgggaggagatgaccaagaaccaggtcagcctgacctgcctggtcaaaggcttctaccccagcgacatcgccgtggagtgggagagcaatgggcagccggagaacaactacaagaccacacctcccatgctggactccgacggctccttcttcctctacagcaagctcaccgtggacaagagcaggtggcagcaggggaacgtcttctcatgctccgtgatgcatgaggctctgcacaaccactacacgcagaagagcctctccctgtctccgggtaaatagtaa

SEQ ID NO: 164 - protein, 447 aa, synthetic construct
  REGION 1..447: note = Humanized C2 IgG2 heavy chain sequence
EVQLVESGGGLVKPGGSLRLSCAASGFTFSGYAMSWVRQAPGKGLEWVSTISSGGTYIYYPDSVKGRFTISRDNAKNSLYLQMNSLRAEDTAVYYCARLGGDNYYEYFDVWGKGTTVTVSSASTKGPSVFPLAPCSRSTSESTAALGCLVKDYFPEPVTVSWNSGALTSGVHTFPAVLQSSGLYSLSSVVTVPSSNFGTQTYTCNVDHKPSNTKVDKTVERKCCVECPPCPAPPVAGPSVFLFPPKPKDTLMISRTPEVTCVVVDVSHEDPEVQFNWYVDGVEVHNAKTKPREEQFNSTFRVVSVLTVVHQDWLNGKEYKCKVSNKGLPAPIEKTISKTKGQPREPQVYTLPPSREEMTKNQVSLTCLVKGFYPSDIAVEWESNGQPENNYKTTPPMLDSDGSFFLYSKLTVDKSRWQQGNVFSCSVMHEALHNHYTQKSLSLSPGK

SEQ ID NO: 165 - DNA, 549 bp, synthetic construct
  misc_feature 1..549: note = Humanized C2 gBLOCK#5 sequence
  source 1..549: mol_type = other DNA
tgctctgggttccaggttccactggtgacgcggcccagccggccgaggtgcagctggtggagtctgggggaggcctggtcaagcctggggggtccctgagactctcctgtgcagcctctggattcaccttcagtggctatgccatgagctgggtccgccaggctccagggaaggggctggagtgggtctcaaccattagtagtggcggaacctacatatactaccccgactcagtgaagggccgattcaccatctccagagacaacgccaagaactcactgtatctgcaaatgaacagcctgagagccgaggacacggccgtgtattactgtgcgagacttgggggggataattactacgaatacttcgatgtctggggcaaagggaccacggtcaccgtctcctccgcctccaccaagggcccatcggtcttccccctggcgccctgctccaggagcacctccgagagcacagccgccctgggctgcctggtcaaggactacttccccgaaccggtgacggtgtcgtggaactcaggcgctctgacca

SEQ ID NO: 166 - DNA, 31 bp, synthetic construct
  misc_feature 1..31: note = pSEC Tag2 overlapping sequence
  source 1..31: mol_type = other DNA
tgctctgggttccaggttccactggtgacgc

SEQ ID NO: 167 - DNA, 32 bp, synthetic construct
  misc_feature 1..32: note = Human IgG2 constant region overlapping sequence
  source 1..32: mol_type = other DNA
gacggtgtcgtggaactcaggcgctctgacca

SEQ ID NO: 168 - DNA, 360 bp, synthetic construct
  misc_feature 1..360: note = Mouse C2 light chain variable region sequence
  source 1..360: mol_type = other DNA
gacattgtgatcacacagtctacagcttccttaggtgtatctctggggcagagggccaccatctcatgcagggccagcaaaagtgtcagtacatctggctatagttatatgcactggtaccaacagagaccaggacagccacccaaactcctcatctatcttgcatccaacctagaatctggggtccctgccaggttcagtggcagtgggtctgggacagacttcaccctcaacatccatcctgtggaggaggaggatgctgcaacctattactgtcagcacagtagggagcttccgttcacgttcggaggggggaccaagctggagataaaacgggctgatgctgcaccaactgtatcc

SEQ ID NO: 169 - protein, 120 aa, synthetic construct
  REGION 1..120: note = Mouse C2 light chain variable region sequence
DIVITQSTASLGVSLGQRATISCRASKSVSTSGYSYMHWYQQRPGQPPKLLIYLASNLESGVPARFSGSGSGTDFTLNIHPVEEEDAATYYCQHSRELPFTFGGGTKLEIKRADAAPTVS

SEQ ID NO: 170 - DNA, 69 bp, synthetic construct
  misc_feature 1..69: note = Mouse C2 light chain variable framework region 1 (FWR1) sequence
  source 1..69: mol_type = other DNA
gacattgtgatcacacagtctacagcttccttaggtgtatctctggggcagagggccaccatctcatgc

SEQ ID NO: 171 - protein, 23 aa, synthetic construct
  REGION 1..23: note = Mouse C2 light chain variable framework region 1 (FWR1) sequence
DIVITQSTASLGVSLGQRATISC

SEQ ID NO: 172 - DNA, 45 bp, synthetic construct
  misc_feature 1..45: note = Mouse C2 light chain variable complementarity determining regions 1 (CDR1) sequence
  source 1..45: mol_type = other DNA
agggccagcaaaagtgtcagtacatctggctatagttatatgcac

SEQ ID NO: 173 - protein, 15 aa, synthetic construct
  REGION 1..15: note = Mouse C2 light chain variable complementarity determining regions 1 (CDR1) sequence
RASKSVSTSGYSYMH

SEQ ID NO: 174 - DNA, 45 bp, synthetic construct
  misc_feature 1..45: note = Mouse C2 light chain variable framework region 2 (FWR2) sequence
  source 1..45: mol_type = other DNA
tggtaccaacagagaccaggacagccacccaaactcctcatctat

SEQ ID NO: 175 - protein, 15 aa, synthetic construct
  REGION 1..15: note = Mouse C2 light chain variable framework region 2 (FWR2) sequence
WYQQRPGQPPKLLIY

SEQ ID NO: 176 - DNA, 20 bp, synthetic construct
  misc_feature 1..20: note = Mouse C2 light chain variable complementarity determining regions 2 (CDR2) sequence
  source 1..20: mol_type = other DNA
cttgcatccaacctagaatc

SEQ ID NO: 177 - protein, 7 aa, synthetic construct
  REGION 1..7: note = Mouse C2 light chain variable complementarity determining regions 2 (CDR2) sequence
LASNLES

SEQ ID NO: 178 - DNA, 97 bp, synthetic construct
  misc_feature 1..97: note = Mouse C2 light chain variable framework region 3 (FWR3) sequence
  source 1..97: mol_type = other DNA
tggggtccctgccaggttcagtggcagtgggtctgggacagacttcaccctcaacatccatcctgtggaggaggaggatgctgcaacctattactgt

SEQ ID NO: 179 - protein, 32 aa, synthetic construct
  REGION 1..32: note = Mouse C2 light chain variable framework region 3 (FWR3) sequence
GVPARFSGSGSGTDFTLNIHPVEEEDAATYYC

SEQ ID NO: 180 - DNA, 27 bp, synthetic construct
  misc_feature 1..27: note = Mouse C2 light chain variable complementarity determining regions 3 (CDR3) sequence
  source 1..27: mol_type = other DNA
cagcacagtagggagcttccgttcacg

SEQ ID NO: 181 - protein, 9 aa, synthetic construct
  REGION 1..9: note = Mouse C2 light chain variable complementarity determining regions 3 (CDR3) sequence
QHSRELPFT

SEQ ID NO: 182 - DNA, 303 bp, synthetic construct
  misc_feature 1..303: note = IGKV7-3*01 light chain variable region sequence
  source 1..303: mol_type = other DNA
gacattgtgctgacccagtctccagcctccttggccgtgtctccaggacagagggccaccatcacctgcagagccagtgagagtgtcagtttcttgggaataaacttaattcactggtatcagcagaaaccaggacaacctcctaaactcctgatttaccaagcatccaataaagacactggggtcccagccaggttcagcggcagtgggtctgggaccgatttcaccctcacaattaatcctgtggaagctaatgatactgcaaattattactgtctgcagagtaagaattttcctcccaca

SEQ ID NO: 183 - protein, 101 aa, synthetic construct
  REGION 1..101: note = IGKV7-3*01 light chain variable region sequence
DIVLTQSPASLAVSPGQRATITCRASESVSFLGINLIHWYQQKPGQPPKLLIYQASNKDTGVPARFSGSGSGTDFTLTINPVEANDTANYYCLQSKNFPPT

SEQ ID NO: 184 - DNA, 69 bp, synthetic construct
  misc_feature 1..69: note = IGKV7-3*01 light chain variable framework region 1 (FWR1) sequence
  source 1..69: mol_type = other DNA
gacattgtgctgacccagtctccagcctccttggccgtgtctccaggacagagggccaccatcacctgc

SEQ ID NO: 185 - protein, 23 aa, synthetic construct
  REGION 1..23: note = IGKV7-3*01 light chain variable framework region 1 (FWR1) sequence
DIVLTQSPASLAVSPGQRATITC

SEQ ID NO: 186 - DNA, 45 bp, synthetic construct
  misc_feature 1..45: note = IGKV7-3*01 light chain variable complementarity determining regions 1 (CDR1) sequence
  source 1..45: mol_type = other DNA
agagccagtgagagtgtcagtttcttgggaataaacttaattcac

SEQ ID NO: 187 - protein, 15 aa, synthetic construct
  REGION 1..15: note = IGKV7-3*01 light chain variable complementarity determining regions 1 (CDR1) sequence
RASESVSFLGINLIH

SEQ ID NO: 188 - DNA, 45 bp, synthetic construct
  misc_feature 1..45: note = IGKV7-3*01 light chain variable framework region 2 (FWR2) sequence
  source 1..45: mol_type = other DNA
tggtatcagcagaaaccaggacaacctcctaaactcctgatttac

SEQ ID NO: 189 - protein, 15 aa, synthetic construct
  REGION 1..15: note = IGKV7-3*01 light chain variable framework region 2 (FWR2) sequence
WYQQKPGQPPKLLIY

SEQ ID NO: 190 - DNA, 21 bp, synthetic construct
  misc_feature 1..21: note = IGKV7-3*01 light chain variable complementarity determining regions 2 (CDR2) sequence
  source 1..21: mol_type = other DNA
caagcatccaataaagacact

SEQ ID NO: 191 - protein, 7 aa, synthetic construct
  REGION 1..7: note = IGKV7-3*01 light chain variable complementarity determining regions 2 (CDR2) sequence
QASNKDT

SEQ ID NO: 192 - DNA, 96 bp, synthetic construct
  misc_feature 1..96: note = IGKV7-3*01 light chain variable framework region 3 (FWR3) sequence
  source 1..96: mol_type = other DNA
ggggtcccagccaggttcagcggcagtgggtctgggaccgatttcaccctcacaattaatcctgtggaagctaatgatactgcaaattattactgt

SEQ ID NO: 193 - protein, 32 aa, synthetic construct
  REGION 1..32: note = IGKV7-3*01 light chain variable framework region 3 (FWR3) sequence
GVPARFSGSGSGTDFTLTINPVEANDTANYYC

SEQ ID NO: 194 - DNA, 339 bp, synthetic construct
  misc_feature 1..339: note = Humanized C2 light chain variable region sequence
  source 1..339: mol_type = other DNA
gacattgtgctgacccagtctccagcctccttggccgtgtctccaggacagagggccaccatcacctgcagagccagtaagagtgtcagtaccagcggatactcctacatgcactggtatcagcagaaaccaggacaacctcctaaactcctgatttacctggcatccaatctggagagcggggtcccagccaggttcagcggcagtgggtctgggaccgatttcaccctcacaattaatcctgtggaagctaatgatactgcaaattattactgtcagcacagtagggagctgcctttcacattcggcggagggaccaaggtggagatcaaacgaact

SEQ ID NO: 195 - protein, 113 aa, synthetic construct
  REGION 1..113: note = Humanized C2 light chain variable region sequence
DIVLTQSPASLAVSPGQRATITCRASKSVSTSGYSYMHWYQQKPGQPPKLLIYLASNLESGVPARFSGSGSGTDFTLTINPVEANDTANYYCQHSRELPFTFGGGTKVEIKRT

SEQ ID NO: 196 - DNA, 69 bp, synthetic construct; identical to SEQ ID NO: 184
  misc_feature 1..69: note = Humanized C2 light chain variable framework region 1 (FWR1) acid sequence
  source 1..69: mol_type = other DNA

SEQ ID NO: 197 - protein, 23 aa, synthetic construct
  REGION 1..23: note = Humanized C2 light chain variable framework region 1 (FWR1) acid sequence
DIVLTQSPASLAVSPGQRATITC

SEQ ID NO: 198 - DNA, 45 bp, synthetic construct
  misc_feature 1..45: note = Humanized C2 light chain variable complementarity determining regions 1 (CDR1) sequence
  source 1..45: mol_type = other DNA
agagccagtaagagtgtcagtaccagcggatactcctacatgcac

SEQ ID NO: 199 - protein, 15 aa, synthetic construct
  REGION 1..15: note = Humanized C2 light chain variable complementarity determining regions 1 (CDR1) sequence
RASKSVSTSGYSYMH

SEQ ID NO: 200 - DNA, 45 bp, synthetic construct; identical to SEQ ID NO: 188
  misc_feature 1..45: note = Humanized C2 heavy light variable framework region 2 (FWR2) acid sequence
  source 1..45: mol_type = other DNA

SEQ ID NO: 201 - protein, 15 aa, synthetic construct
  REGION 1..15: note = Humanized C2 heavy light variable framework region 2 (FWR2) acid sequence
WYQQKPGQPPKLLIY

SEQ ID NO: 202 - DNA, 21 bp, synthetic construct
  misc_feature 1..21: note = Humanized C2 light chain variable complementarity determining regions 2 (CDR2) sequence
  source 1..21: mol_type = other DNA
ctggcatccaatctggagagc

SEQ ID NO: 203 - protein, 7 aa, synthetic construct
  REGION 1..7: note = Humanized C2 light chain variable complementarity determining regions 2 (CDR2) sequence
LASNLES

SEQ ID NO: 204 - DNA, 96 bp, synthetic construct; identical to SEQ ID NO: 192
  misc_feature 1..96: note = Humanized C2 light chain variable framework region 3 (FWR3) acid sequence
  source 1..96: mol_type = other DNA

SEQ ID NO: 205 - protein, 32 aa, synthetic construct; identical to SEQ ID NO: 193
  REGION 1..32: note = Humanized C2 light chain variable framework region 3 (FWR3) acid sequence

SEQ ID NO: 206 - DNA, 27 bp, synthetic construct
  misc_feature 1..27: note = Humanized C2 light chain variable complementarity determining regions 3 (CDR3) sequence
  source 1..27: mol_type = other DNA
cagcacagtagggagctgcctttcaca

SEQ ID NO: 207 - protein, 9 aa, synthetic construct
  REGION 1..9: note = Humanized C2 light chain variable complementarity determining regions 3 (CDR3) sequence
QHSRELPFT

SEQ ID NO: 208 - DNA, 27 bp, synthetic construct
  misc_feature 1..27: note = Humanized C2 light chain variable complementarity determining regions 3 (CDR3) sequence
  source 1..27: mol_type = other DNA
ctgcagagtaagaattttcctcccaca

SEQ ID NO: 209 - protein, 9 aa, synthetic construct
  REGION 1..9: note = Humanized C2 light chain variable complementarity determining regions 3 (CDR3) sequence
LQSKNFPPT

SEQ ID NO: 210 - DNA, 813 bp, synthetic construct
  misc_feature 1..813: note = Humanized C2 gBLOCK#6 sequence (Kappa light chain in pCDNA3.1 V5)
  source 1..813: mol_type = other DNA
actcactatagggagacccaagctggctagttaagcttgggccaccatggagacagacacactcctgctatgggtactgctgctctgggttccaggttccactggtgacgacattgtgctgacccagtctccagcctccttggccgtgtctccaggacagagggccaccatcacctgcagagccagtaagagtgtcagtaccagcggatactcctacatgcactggtatcagcagaaaccaggacaacctcctaaactcctgatttacctggcatccaatctggagagcggggtcccagccaggttcagcggcagtgggtctgggaccgatttcaccctcacaattaatcctgtggaagctaatgatactgcaaattattactgtcagcacagtagggagctgcctttcacattcggcggagggaccaaggtggagatcaaacgaactacggtggctgcaccatctgtcttcatcttcccgccatctgatgagcagttgaaatctggaactgcctctgttgtgtgcctgctgaataacttctatcccagagaggccaaagtacagtggaaggtggataacgccctccaatcgggtaactcccaggagagtgtcacagagcaggacagcaaggacagcacctacagcctcagcagcaccctgacgctgagcaaagcagactacgagaaacacaaagtctacgcctgcgaagtcacccatcagggcctgagctcgcccgtcacaaagagcttcaacaggggagagtgttagtaagtttaaacccgctgatcagcctcgactgtgccttctagttg

SEQ ID NO: 211 - DNA, 32 bp, synthetic construct; identical to SEQ ID NO: 161
  misc_feature 1..32: note = pCDNA3.1 V5 5' overlapping sequence
  source 1..32: mol_type = other DNA

SEQ ID NO: 212 - DNA, 33 bp, synthetic construct; identical to SEQ ID NO: 64
  misc_feature 1..33: note = pCDNA3.1 V5 3' overlapping sequence
  source 1..33: mol_type = other DNA

SEQ ID NO: 213 - DNA, 748 bp, synthetic construct
  misc_feature 1..748: note = Humanized C2 gBLOCK#7 sequence (Kappa light chain in pSEC Tag2)
  source 1..748: mol_type = other DNA
tgctctgggttccaggttccactggtgacgcggcccagccggccgacattgtgctgacccagtctccagcctccttggccgtgtctccaggacagagggccaccatcacctgcagagccagtaagagtgtcagtaccagcggatactcctacatgcactggtatcagcagaaaccaggacaacctcctaaactcctgatttacctggcatccaatctggagagcggggtcccagccaggttcagcggcagtgggtctgggaccgatttcaccctcacaattaatcctgtggaagctaatgatactgcaaattattactgtcagcacagtagggagctgcctttcacattcggcggagggaccaaggtggagatcaaacgaactacggtggctgcaccatctgtcttcatcttcccgccatctgatgagcagttgaaatctggaactgcctctgttgtgtgcctgctgaataacttctatcccagagaggccaaagtacagtggaaggtggataacgccctccaatcgggtaactcccaggagagtgtcacagagcaggacagcaaggacagcacctacagcctcagcagcaccctgacgctgagcaaagcagactacgagaaacacaaagtctacgcctgcgaagtcacccatcagggcctgagctcgcccgtcacaaagagcttcaacaggggagagtgttagtaagtttaaacccgctgatcagcctcgactgtgccttctagttg

SEQ ID NO: 214 - DNA, 31 bp, synthetic construct; identical to SEQ ID NO: 166
  misc_feature 1..31: note = pSEC Tag2 5' overlapping sequence
  source 1..31: mol_type = other DNA

SEQ ID NO: 215 - DNA, 33 bp, synthetic construct; identical to SEQ ID NO: 64
  misc_feature 1..33: note = pSEC Tag2 3' overlapping sequence
  source 1..33: mol_type = other DNA

SEQ ID NO: 216 - DNA, 813 bp, synthetic construct
  misc_feature 1..813: note = Humanized C2 gBLOCK#8 sequence (lambda light chain in pCDNA3.1 V5)
  source 1..813: mol_type = other DNA
actcactatagggagacccaagctggctagttaagcttgggccaccatggagacagacacactcctgctatgggtactgctgctctgggttccaggttccactggtgacgacattgtgctgacccagtctccagcctccttggccgtgtctccaggacagagggccaccatcacctgcagagccagtaagagtgtcagtaccagcggatactcctacatgcactggtatcagcagaaaccaggacaacctcctaaactcctgatttacctggcatccaatctggagagcggggtcccagccaggttcagcggcagtgggtctgggaccgatttcaccctcacaattaatcctgtggaagctaatgatactgcaaattattactgtcagcacagtagggagctgcctttcacattcggcggagggaccaaggtggagatcaaacgaactggtcagcccaaggctgccccctcggtcactctgttcccgccctcctctgaggagcttcaagccaacaaggccacactggtgtgtctcataagtgacttctacccgggagccgtgacagtggcctggaaggcagatagcagccccgtcaaggcgggagtggagaccaccacaccctccaaacaaagcaacaacaagtacgcggccagcagctatctgagcctgacgcctgagcagtggaagtcccacagaagctacagctgccaggtcacgcatgaagggagcaccgtggagaagacagtggcccctacagaatgttcatagtaagtttaaacccgctgatcagcctcgactgtgccttctagttg

SEQ ID NO: 217 - DNA, 32 bp, synthetic construct; identical to SEQ ID NO: 161
  misc_feature 1..32: note = pCDNA3.1 V5 5' overlapping sequence
  source 1..32: mol_type = other DNA

SEQ ID NO: 218 - DNA, 33 bp, synthetic construct; identical to SEQ ID NO: 64
  misc_feature 1..33: note = pCDNA3.1 V5 3' overlapping sequence
  source 1..33: mol_type = other DNA

SEQ ID NO: 219 - DNA, 748 bp, synthetic construct
  misc_feature 1..748: note = Humanized C2 gBLOCK#9 sequence (lambda light chain in pSEC Tag2)
  source 1..748: mol_type = other DNA
tgctctgggttccaggttccactggtgacgcggcccagccggccgacattgtgctgacccagtctccagcctccttggccgtgtctccaggacagagggccaccatcacctgcagagccagtaagagtgtcagtaccagcggatactcctacatgcactggtatcagcagaaaccaggacaacctcctaaactcctgatttacctggcatccaatctggagagcggggtcccagccaggttcagcggcagtgggtctgggaccgatttcaccctcacaattaatcctgtggaagctaatgatactgcaaattattactgtcagcacagtagggagctgcctttcacattcggcggagggaccaaggtggagatcaaacgaactggtcagcccaaggctgccccctcggtcactctgttcccgccctcctctgaggagcttcaagccaacaaggccacactggtgtgtctcataagtgacttctacccgggagccgtgacagtggcctggaaggcagatagcagccccgtcaaggcgggagtggagaccaccacaccctccaaacaaagcaacaacaagtacgcggccagcagctatctgagcctgacgcctgagcagtggaagtcccacagaagctacagctgccaggtcacgcatgaagggagcaccgtggagaagacagtggcccctacagaatgttcatagtaagtttaaacccgctgatcagcctcgactgtgccttctagttg

SEQ ID NO: 220 - DNA, 31 bp, synthetic construct; identical to SEQ ID NO: 166
  misc_feature 1..31: note = pSEC Tag2 5' overlapping sequence
  source 1..31: mol_type = other DNA

SEQ ID NO: 221 - DNA, 33 bp, synthetic construct; identical to SEQ ID NO: 64
  misc_feature 1..33: note = pSEC Tag2 3' overlapping sequence
  source 1..33: mol_type = other DNA

SEQ ID NO: 222 - DNA, 63 bp, synthetic construct
  misc_feature 1..63: note = Murine Ig kappa chain leader sequence
  source 1..63: mol_type = other DNA
atggagacagacacactcctgctatgggtactgctgctctgggttccaggttccactggtgac

SEQ ID NO: 223 - protein, 21 aa, synthetic construct
  REGION 1..21: note = Murine Ig kappa chain leader sequence
METDTLLLWVLLLWVPGSTGD

SEQ ID NO: 224 - DNA, 60 bp, synthetic construct
  misc_feature 1..60: note = Interleukin-2 (IL-2) leader sequence
  source 1..60: mol_type = other DNA
atgtacaggatgcaactcctgtcttgcattgcactaagtcttgcacttgtcacaaacagt

SEQ ID NO: 225 - protein, 20 aa, synthetic construct
  REGION 1..20: note = Interleukin-2 (IL-2) leader sequence
MYRMQLLSCIALSLALVTNS

SEQ ID NO: 226 - DNA, 48 bp, synthetic construct
  misc_feature 1..48: note = CD33 leader sequence
  source 1..48: mol_type = other DNA
atgcctcttctgcttctgcttcctctgctttgggctggagctcttgct

SEQ ID NO: 227 - protein, 16 aa, synthetic construct
  REGION 1..16: note = CD33 leader sequence
MPLLLLLPLLWAGALA

SEQ ID NO: 228 - DNA, 57 bp, synthetic construct
  misc_feature 1..57: note = IGHV3-21*03 leader sequence
  source 1..57: mol_type = other DNA
atggaactggggctccgctgggttttccttgttgctattttagaaggtgtccagtgt

SEQ ID NO: 229 - protein, 19 aa, synthetic construct
  REGION 1..19: note = IGHV3-21*03 leader sequence
MELGLRWVFLVAILEGVQC

SEQ ID NO: 230 - DNA, 60 bp, synthetic construct
  misc_feature 1..60: note = IGHV3-11*02 leader sequence
  source 1..60: mol_type = other DNA
atggaagccccagcgcagcttctcttcctcctgctactctggctcccagataccactgga

SEQ ID NO: 231 - protein, 20 aa, synthetic construct
  REGION 1..20: note = IGHV3-11*02 leader sequence
MEAPAQLLFLLLLWLPDTTG

SEQ ID NO: 232 - DNA, 729 bp, synthetic construct
  misc_feature 1..729: note = Humanized E6 single chain GS3
  source 1..729: mol_type = other DNA
gaggtgcagctggtggagtctgggggaggcctggtcaagcctggggggtccctgagactctcctgtgcagcctctggattcaccttcagtaggtatggcatgagctgggtccgccaggctccagggaagaggctggagtgggtctcaaccattagtggcggaggcacctacatatactacccagactcagtgaagggccgattcaccatctccagagacaacgccaagaacaccctgtatctgcaaatgaacagcctgagagccgaggacacggctgtgtattactgtaccagagataactatggccgcaactatgattatggcatggattattggggccagggcaccctggtgaccgtgagcagcggcggtggcggatccggcggtggcggatccggcggtggcggatccgaaattgtgttgacacagtctccagccaccctgtctttgtctccaggggaaagagccaccctcacctgcagcgccaccagcagtgttagctacatccactggtaccaacagaggcctggccagagccccaggctcctcatctatagcacctccaacctggccagcggcatcccagccaggttcagtggcagtgggtctgggagcgactacactctcaccatcagcagcctagagcctgaagattttgcagtttattactgtcagcagcgtagcagctcccctttcacctttggcagcggcaccaaagtggaaattaaa

SEQ ID NO: 233 - protein, 243 aa, synthetic construct
  REGION 1..243: note = Humanized E6 single chain GS3
EVQLVESGGGLVKPGGSLRLSCAASGFTFSRYGMSWVRQAPGKRLEWVSTISGGGTYIYYPDSVKGRFTISRDNAKNTLYLQMNSLRAEDTAVYYCTRDNYGRNYDYGMDYWGQGTLVTVSSGGGGSGGGGSGGGGSEIVLTQSPATLSLSPGERATLTCSATSSVSYIHWYQQRPGQSPRLLIYSTSNLASGIPARFSGSGSGSDYTLTISSLEPEDFAVYYCQQRSSSPFTFGSGTKVEIK

SEQ ID NO: 234 - DNA, 747 bp, synthetic construct
  misc_feature 1..747: note = Humanized E6 single chain IgG1noC
  source 1..747: mol_type = other DNA
gaggtgcagctggtggagtctgggggaggcctggtcaagcctggggggtccctgagactctcctgtgcagcctctggattcaccttcagtaggtatggcatgagctgggtccgccaggctccagggaagaggctggagtgggtctcaaccattagtggcggaggcacctacatatactacccagactcagtgaagggccgattcaccatctccagagacaacgccaagaacaccctgtatctgcaaatgaacagcctgagagccgaggacacggctgtgtattactgtaccagagataactatggccgcaactatgattatggcatggattattggggccagggcaccctggtgaccgtgagcagcgataaaacccatactaaaccgccaaaaccggcgccggaactgctgggtggtcctggtaccggtgaaattgtgttgacacagtctccagccaccctgtctttgtctccaggggaaagagccaccctcacctgcagcgccaccagcagtgttagctacatccactggtaccaacagaggcctggccagagccccaggctcctcatctatagcacctccaacctggccagcggcatcccagccaggttcagtggcagtgggtctgggagcgactacactctcaccatcagcagcctagagcctgaagattttgcagtttattactgtcagcagcgtagcagctcccctttcacctttggcagcggcaccaaagtggaaattaaa

SEQ ID NO: 235 - protein, 249 aa, synthetic construct
  REGION 1..249: note = Humanized E6 single chain IgG1noC
EVQLVESGGGLVKPGGSLRLSCAASGFTFSRYGMSWVRQAPGKRLEWVSTISGGGTYIYYPDSVKGRFTISRDNAKNTLYLQMNSLRAEDTAVYYCTRDNYGRNYDYGMDYWGQGTLVTVSSDKTHTKPPKPAPELLGGPGTGEIVLTQSPATLSLSPGERATLTCSATSSVSYIHWYQQRPGQSPRLLIYSTSNLASGIPARFSGSGSGSDYTLTISSLEPEDFAVYYCQQRSSSPFTFGSGTKVEIK

SEQ ID NO: 236 - DNA, 813 bp, synthetic construct
  misc_feature 1..813: note = Humanized E6 single chain X4 (linker is IgG1 and IgG2 modified hinge region)
  source 1..813: mol_type = other DNA
gaggtgcagctggtggagtctgggggaggcctggtcaagcctggggggtccctgagactctcctgtgcagcctctggattcaccttcagtaggtatggcatgagctgggtccgccaggctccagggaagaggctggagtgggtctcaaccattagtggcggaggcacctacatatactacccagactcagtgaagggccgattcaccatctccagagacaacgccaagaacaccctgtatctgcaaatgaacagcctgagagccgaggacacggctgtgtattactgtaccagagataactatggccgcaactatgattatggcatggattattggggccagggcaccctggtgaccgtgagcagcgataaaacccatactaaaccgccaaaaccggcgccggaactgctgggtggtcctggtaccggtactggtggtccgactattaaacctccgaaacctccgaaacctgctccgaacctgctgggtggtccggaaattgtgttgacacagtctccagccaccctgtctttgtctccaggggaaagagccaccctcacctgcagcgccaccagcagtgttagctacatccactggtaccaacagaggcctggccagagccccaggctcctcatctatagcacctccaacctggccagcggcatcccagccaggttcagtggcagtgggtctgggagcgactacactctcaccatcagcagcctagagcctgaagattttgcagtttattactgtcagcagcgtagcagctcccctttcacctttggcagcggcaccaaagtggaaattaaa

SEQ ID NO: 237 - protein, 271 aa, synthetic construct
  REGION 1..271: note = Humanized E6 single chain X4 (linker is IgG1 and IgG2 modified hinge region)
EVQLVESGGGLVKPGGSLRLSCAASGFTFSRYGMSWVRQAPGKRLEWVSTISGGGTYIYYPDSVKGRFTISRDNAKNTLYLQMNSLRAEDTAVYYCTRDNYGRNYDYGMDYWGQGTLVTVSSDKTHTKPPKPAPELLGGPGTGTGGPTIKPPKPPKPAPNLLGGPEIVLTQSPATLSLSPGERATLTCSATSSVSYIHWYQQRPGQSPRLLIYSTSNLASGIPARFSGSGSGSDYTLTISSLEPEDFAVYYCQQRSSSPFTFGSGTKVEIK

SEQ ID NO: 238 - DNA, 747 bp, synthetic construct
  misc_feature 1..747: note = Humanized C2 single chain GS3
  source 1..747: mol_type = other DNA
gaggtgcagctggtggagtctgggggaggcctggtcaagcctggggggtccctgagactctcctgtgcagcctctggattcaccttcagtggctatgccatgagctgggtccgccaggctccagggaaggggctggagtgggtctcaaccattagtagtggcggaacctacatatactaccccgactcagtgaagggccgattcaccatctccagagacaacgccaagaactcactgtatctgcaaatgaacagcctgagagccgaggacacggccgtgtattactgtgcgagacttgggggggataattactacgaatacttcgatgtctggggcaaagggaccacggtcaccgtctcctccggcggtggcggatccggcggtggcggatccggcggtggcggatccgacattgtgctgacccagtctccagcctccttggccgtgtctccaggacagagggccaccatcacctgcagagccagtaagagtgtcagtaccagcggatactcctacatgcactggtatcagcagaaaccaggacaacctcctaaactcctgatttacctggcatccaatctggagagcggggtcccagccaggttcagcggcagtgggtctgggaccgatttcaccctcacaattaatcctgtggaagctaatgatactgcaaattattactgtcagcacagtagggagctgcctttcacattcggcggagggaccaaggtggagatcaaacgaact

SEQ ID NO: 239 - protein, 249 aa, synthetic construct
  REGION 1..249: note = Humanized C2 single chain GS3
EVQLVESGGGLVKPGGSLRLSCAASGFTFSGYAMSWVRQAPGKGLEWVSTISSGGTYIYYPDSVKGRFTISRDNAKNSLYLQMNSLRAEDTAVYYCARLGGDNYYEYFDVWGKGTTVTVSSGGGGSGGGGSGGGGSDIVLTQSPASLAVSPGQRATITCRASKSVSTSGYSYMHWYQQKPGQPPKLLIYLASNLESGVPARFSGSGSGTDFTLTINPVEANDTANYYCQHSRELPFTFGGGTKVEIKRT

SEQ ID NO: 240 - DNA, 765 bp, synthetic construct
  misc_feature 1..765: note = Humanized C2 single chain IgG (no Cysteine)
  source 1..765: mol_type = other DNA
gaggtgcagctggtggagtctgggggaggcctggtcaagcctggggggtccctgagactctcctgtgcagcctctggattcaccttcagtggctatgccatgagctgggtccgccaggctccagggaaggggctggagtgggtctcaaccattagtagtggcggaacctacatatactaccccgactcagtgaagggccgattcaccatctccagagacaacgccaagaactcactgtatctgcaaatgaacagcctgagagccgaggacacggccgtgtattactgtgcgagacttgggggggataattactacgaatacttcgatgtctggggcaaagggaccacggtcaccgtctcctccgataaaacccatactaaaccgccaaaaccggcgccggaactgctgggtggtcctggtaccggtgacattgtgctgacccagtctccagcctccttggccgtgtctccaggacagagggccaccatcacctgcagagccagtaagagtgtcagtaccagcggatactcctacatgcactggtatcagcagaaaccaggacaacctcctaaactcctgatttacctggcatccaatctggagagcggggtcccagccaggttcagcggcagtgggtctgggaccgatttcaccctcacaattaatcctgtggaagctaatgatactgcaaattattactgtcagcacagtagggagctgcctttcacattcggcggagggaccaaggtggagatcaaacgaact

SEQ ID NO: 241 - protein, 255 aa, synthetic construct
  REGION 1..255: note = Humanized C2 single chain IgG (no Cysteine)
EVQLVESGGGLVKPGGSLRLSCAASGFTFSGYAMSWVRQAPGKGLEWVSTISSGGTYIYYPDSVKGRFTISRDNAKNSLYLQMNSLRAEDTAVYYCARLGGDNYYEYFDVWGKGTTVTVSSDKTHTKPPKPAPELLGGPGTGDIVLTQSPASLAVSPGQRATITCRASKSVSTSGYSYMHWYQQKPGQPPKLLIYLASNLESGVPARFSGSGSGTDFTLTINPVEANDTANYYCQHSRELPFTFGGGTKVEIKRT

SEQ ID NO: 242 - DNA, 831 bp, synthetic construct
  misc_feature 1..831: note = Humanized C2 single chain X4 (linker is IgG1 and IgG2 modified hinge region)
  source 1..831: mol_type = other DNA
gaggtgcagctggtggagtctgggggaggcctggtcaagcctggggggtccctgagactctcctgtgcagcctctggattcaccttcagtggctatgccatgagctgggtccgccaggctccagggaaggggctggagtgggtctcaaccattagtagtggcggaacctacatatactaccccgactcagtgaagggccgattcaccatctccagagacaacgccaagaactcactgtatctgcaaatgaacagcctgagagccgaggacacggccgtgtattactgtgcgagacttgggggggataattactacgaatacttcgatgtctggggcaaagggaccacggtcaccgtctcctccgataaaacccatactaaaccgccaaaaccggcgccggaactgctgggtggtcctggtaccggtactggtggtccgactattaaacctccgaaacctccgaaacctgctccgaacctgctgggtggtccggacattgtgctgacccagtctccagcctccttggccgtgtctccaggacagagggccaccatcacctgcagagccagtaagagtgtcagtaccagcggatactcctacatgcactggtatcagcagaaaccaggacaacctcctaaactcctgatttacctggcatccaatctggagagcggggtcccagccaggttcagcggcagtgggtctgggaccgatttcaccctcacaattaatcctgtggaagctaatgatactgcaaattattactgtcagcacagtagggagctgcctttcacattcggcggagggaccaaggtggagatcaaacgaact

SEQ ID NO: 243 - protein, 277 aa, synthetic construct
  REGION 1..277: note = Humanized C2 single chain X4 (linker is IgG1 and IgG2 modified hinge region)
EVQLVESGGGLVKPGGSLRLSCAASGFTFSGYAMSWVRQAPGKGLEWVSTISSGGTYIYYPDSVKGRFTISRDNAKNSLYLQMNSLRAEDTAVYYCARLGGDNYYEYFDVWGKGTTVTVSSDKTHTKPPKPAPELLGGPGTGTGGPTIKPPKPPKPAPNLLGGPDIVLTQSPASLAVSPGQRATITCRASKSVSTSGYSYMHWYQQKPGQPPKLLIYLASNLESGVPARFSGSGSGTDFTLTINPVEANDTANYYCQHSRELPFTFGGGTKVEIKRT

SEQ ID NO: 244 - DNA, 744 bp, synthetic construct
  misc_feature 1..744: note = Humanized C3 single chain GS3
  source 1..744: mol_type = other DNA
caggttcagctggtgcagtctggagctgaggtgaagaagcctggggcctcagtgaaggtctcctgcaaggcttctggttacacctttaccgactacgccatgaactgggtgcgacaggcccctggacaagggcttgagtggatgggagtgatcagcaccttcagcggtaacacaaacttcaaccagaagttcaagggcagagtcaccatgaccacagacacatccacgagcacagcctacatggagctgaggagcctgagatctgacgacacggccgtgtattactgtgcgagaagcgactactacggcccatacttcgactactggggccagggcaccaccctgaccgtgtccagcggcggtggcggatccggcggtggcggatccggcggtggcggatccgatattgtgatgacccagactccactctctctgtccgtcacccctggacagccggcctccatctcctgcaggtctagtcagaccattgtccatagtaatggaaacacctatttggagtggtacctgcagaagccaggccagtctccacagctcctgatctataaggtttccaaccggttctctggagtgccagataggttcagtggcagcgggtcagggacagatttcacactgaaaatcagccgggtggaggctgaggatgttggggtttattactgcttccaaggtagccacgtgcctttcaccttcggcggagggaccaaggtggagatcaaacgaact

SEQ ID NO: 245 - protein, 248 aa, synthetic construct
  REGION 1..248: note = Humanized C3 single chain GS3
QVQLVQSGAEVKKPGASVKVSCKASGYTFTDYAMNWVRQAPGQGLEWMGVISTFSGNTNFNQKFKGRVTMTTDTSTSTAYMELRSLRSDDTAVYYCARSDYYGPYFDYWGQGTTLTVSSGGGGSGGGGSGGGGSDIVMTQTPLSLSVTPGQPASISCRSSQTIVHSNGNTYLEWYLQKPGQSPQLLIYKVSNRFSGVPDRFSGSGSGTDFTLKISRVEAEDVGVYYCFQGSHVPFTFGGGTKVEIKRT

SEQ ID NO: 246 - DNA, 762 bp, synthetic construct
  misc_feature 1..762: note = Humanized C3 single chain IgG1 (no Cysteine)
  source 1..762: mol_type = other DNA
caggttcagctggtgcagtctggagctgaggtgaagaagcctggggcctcagtgaaggtctcctgcaaggcttctggttacacctttaccgactacgccatgaactgggtgcgacaggcccctggacaagggcttgagtggatgggagtgatcagcaccttcagcggtaacacaaacttcaaccagaagttcaagggcagagtcaccatgaccacagacacatccacgagcacagcctacatggagctgaggagcctgagatctgacgacacggccgtgtattactgtgcgagaagcgactactacggcccatacttcgactactggggccagggcaccaccctgaccgtgtccagcgataaaacccatactaaaccgccaaaaccggcgccggaactgctgggtggtcctggtaccggtgatattgtgatgacccagactccactctctctgtccgtcacccctggacagccggcctccatctcctgcaggtctagtcagaccattgtccatagtaatggaaacacctatttggagtggtacctgcagaagccaggccagtctccacagctcctgatctataaggtttccaaccggttctctggagtgccagataggttcagtggcagcgggtcagggacagatttcacactgaaaatcagccgggtggaggctgaggatgttggggtttattactgcttccaaggtagccacgtgcctttcaccttcggcggagggaccaaggtggagatcaaacgaact

SEQ ID NO: 247 - protein, 254 aa, synthetic construct
  REGION 1..254: note = Humanized C3 single chain IgG1 (no Cysteine)
QVQLVQSGAEVKKPGASVKVSCKASGYTFTDYAMNWVRQAPGQGLEWMGVISTFSGNTNFNQKFKGRVTMTTDTSTSTAYMELRSLRSDDTAVYYCARSDYYGPYFDYWGQGTTLTVSSDKTHTKPPKPAPELLGGPGTGDIVMTQTPLSLSVTPGQPASISCRSSQTIVHSNGNTYLEWYLQKPGQSPQLLIYKVSNRFSGVPDRFSGSGSGTDFTLKISRVEAEDVGVYYCFQGSHVPFTFGGGTKVEIKRT

SEQ ID NO: 248 - DNA, 828 bp, synthetic construct
  misc_feature 1..828: note = Humanized C3 single chain X4 (linker is IgG1 and IgG2 modified hinge region)
  source 1..828: mol_type = other DNA
caggttcagctggtgcagtctggagctgaggtgaagaagcctggggcctcagtgaaggtctcctgcaaggcttctggttacacctttaccgactacgccatgaactgggtgcgacaggcccctggacaagggcttgagtggatgggagtgatcagcaccttcagcggtaacacaaacttcaaccagaagttcaagggcagagtcaccatgaccacagacacatccacgagcacagcctacatggagctgaggagcctgagatctgacgacacggccgtgtattactgtgcgagaagcgactactacggcccatacttcgactactggggccagggcaccaccctgaccgtgtccagcgataaaacccatactaaaccgccaaaaccggcgccggaactgctgggtggtcctggtaccggtactggtggtccgactattaaacctccgaaacctccgaaacctgctccgaacctgctgggtggtccggatattgtgatgacccagactccactctctctgtccgtcacccctggacagccggcctccatctcctgcaggtctagtcagaccattgtccatagtaatggaaacacctatttggagtggtacctgcagaagccaggccagtctccacagctcctgatctataaggtttccaaccggttctctggagtgccagataggttcagtggcagcgggtcagggacagatttcacactgaaaatcagccgggtggaggctgaggatgttggggtttattactgcttccaaggtagccacgtgcctttcaccttcggcggagggaccaaggtggagatcaaacgaact

SEQ ID NO: 249 - protein, 276 aa, synthetic construct
  REGION 1..276: note = Humanized C3 single chain X4 (linker is IgG1 and IgG2 modified hinge region)
QVQLVQSGAEVKKPGASVKVSCKASGYTFTDYAMNWVRQAPGQGLEWMGVISTFSGNTNFNQKFKGRVTMTTDTSTSTAYMELRSLRSDDTAVYYCARSDYYGPYFDYWGQGTTLTVSSDKTHTKPPKPAPELLGGPGTGTGGPTIKPPKPPKPAPNLLGGPDIVMTQTPLSLSVTPGQPASISCRSSQTIVHSNGNTYLEWYLQKPGQSPQLLIYKVSNRFSGVPDRFSGSGSGTDFTLKISRVEAEDVGVYYCFQGSHVPFTFGGGTKVEIKRT

SEQ ID NO: 250 - DNA, 741 bp, synthetic construct
  misc_feature 1..741: note = Humanized C8 single chain GS3 (linker is [Gly4Ser1]3)
  source 1..741: mol_type = other DNA
gaggtgcagctggtggagtctgggggaggcctggtcaagcctggggggtccctgagactctcctgtgcagcctctggattcaccttcagtggctatgccatgagctgggtccgccaggctccagggaaggggctggagtgggtctcaaccattagtagtggcggaacctacatatactaccctgactcagtgaagggccgattcaccatctccagagacaacgccaagaactcactgtatctgcaaatgaacagcctgagagccgaggacacggccgtgtattactgtgcgagactgggcggcgataactattatgaatattggggcaaagggaccacggtcaccgtctcctccggcggtggcggatccggcggtggcggatccggcggtggcggatccgacatcgtgatgacccagtctccagactccctggctgtgtctctgggcgagagggccaccatcaactgcagggccagcaagagtgttagcaccagcggctacagctacatgcactggtaccagcagaaaccaggacagcctcctaagctgctcatttacctggtgtctaacctggaatccggggtccctgaccgattcagtggcagcgggtctgggacagatttcactctcaccatcagcagcctgcaggctgaagatgtggcagtttattactgtcaacacattcgggaactgaccaggagtgaattcggcggagggaccaaggtggagatcaaacgaact

SEQ ID NO: 251 - protein, 247 aa, synthetic construct
  REGION 1..247: note = Humanized C8 single chain GS3 (linker is [Gly4Ser1]3)
EVQLVESGGGLVKPGGSLRLSCAASGFTFSGYAMSWVRQAPGKGLEWVSTISSGGTYIYYPDSVKGRFTISRDNAKNSLYLQMNSLRAEDTAVYYCARLGGDNYYEYWGKGTTVTVSSGGGGSGGGGSGGGGSDIVMTQSPDSLAVSLGERATINCRASKSVSTSGYSYMHWYQQKPGQPPKLLIYLVSNLESGVPDRFSGSGSGTDFTLTISSLQAEDVAVYYCQHIRELTRSEFGGGTKVEIKRT

SEQ ID NO: 252 - DNA, 759 bp, synthetic construct
  misc_feature 1..759: note = Humanized C8 single chain IgG1 (no Cysteine)
  source 1..759: mol_type = other DNA
gaggtgcagctggtggagtctgggggaggcctggtcaagcctggggggtccctgagactctcctgtgcagcctctggattcaccttcagtggctatgccatgagctgggtccgccaggctccagggaaggggctggagtgggtctcaaccattagtagtggcggaacctacatatactaccctgactcagtgaagggccgattcaccatctccagagacaacgccaagaactcactgtatctgcaaatgaacagcctgagagccgaggacacggccgtgtattactgtgcgagactgggcggcgataactattatgaatattggggcaaagggaccacggtcaccgtctcctccgataaaacccatactaaaccgccaaaaccggcgccggaactgctgggtggtcctggtaccggtgacatcgtgatgacccagtctccagactccctggctgtgtctctgggcgagagggccaccatcaactgcagggccagcaagagtgttagcaccagcggctacagctacatgcactggtaccagcagaaaccaggacagcctcctaagctgctcatttacctggtgtctaacctggaatccggggtccctgaccgattcagtggcagcgggtctgggacagatttcactctcaccatcagcagcctgcaggctgaagatgtggcagtttattactgtcaacacattcgggaactgaccaggagtgaattcggcggagggaccaaggtggagatcaaacgaact

SEQ ID NO: 253 - protein, 253 aa, synthetic construct
  REGION 1..253: note = Humanized C8 single chain IgG1 (no Cysteine)
EVQLVESGGGLVKPGGSLRLSCAASGFTFSGYAMSWVRQAPGKGLEWVSTISSGGTYIYYPDSVKGRFTISRDNAKNSLYLQMNSLRAEDTAVYYCARLGGDNYYEYWGKGTTVTVSSDKTHTKPPKPAPELLGGPGTGDIVMTQSPDSLAVSLGERATINCRASKSVSTSGYSYMHWYQQKPGQPPKLLIYLVSNLESGVPDRFSGSGSGTDFTLTISSLQAEDVAVYYCQHIRELTRSEFGGGTKVEIKRT

SEQ ID NO: 254 - DNA, 825 bp, synthetic construct
  misc_feature 1..825: note = Humanized C8 single chain X4 (linker is IgG1 and IgG2 modified hinge region)
  source 1..825: mol_type = other DNA
gaggtgcagctggtggagtctgggggaggcctggtcaagcctggggggtccctgagactctcctgtgcagcctctggattcaccttcagtggctatgccatgagctgggtccgccaggctccagggaaggggctggagtgggtctcaaccattagtagtggcggaacctacatatactacccagactcagtgaagggccgattcaccatctccagagacaacgccaagaactcactgtatctgcaaatgaacagcctgagagccgaggacacggccgtgtattactgtgcgagactgggcggcgacaattactatgagtattggggcaaagggaccacggtcaccgtctcctccgataaaacccatactaaaccgccaaaaccggcgccggaactgctgggtggtcctggtaccggtactggtggtccgactattaaacctccgaaacctccgaaacctgctccgaacctgctgggtggtccggacatcgtgatgacccagtctccagactccctggctgtgtctctgggcgagagggccaccatcaactgcagggccagcaagagtgttagcaccagcggctacagctacatgcactggtaccagcagaaaccaggacagcctcctaagctgctcatttacctggtgtctaacctggaatccggggtccctgaccgattcagtggcagcgggtctgggacagatttcactctcaccatcagcagcctgcaggctgaagatgtggcagtttattactgtcaacacattcgggaactgaccaggagtgaattcggcggagggaccaaggtggagatcaaacgaact

SEQ ID NO: 255 - protein, 275 aa, synthetic construct
  REGION 1..275: note = Humanized C8 single chain X4 (linker is IgG1 and IgG2 modified hinge region)
EVQLVESGGGLVKPGGSLRLSCAASGFTFSGYAMSWVRQAPGKGLEWVSTISSGGTYIYYPDSVKGRFTISRDNAKNSLYLQMNSLRAEDTAVYYCARLGGDNYYEYWGKGTTVTVSSDKTHTKPPKPAPELLGGPGTGTGGPTIKPPKPPKPAPNLLGGPDIVMTQSPDSLAVSLGERATINCRASKSVSTSGYSYMHWYQQKPGQPPKLLIYLVSNLESGVPDRFSGSGSGTDFTLTISSLQAEDVAVYYCQHIRELTRSEFGGGTKVEIKRT

SEQ ID NO: 256 - DNA, 1509 bp, synthetic construct
  misc_feature 1..1509: note = pSECTag2 E6 scFV-FC
  source 1..1509: mol_type = other DNA
atggagacagacacactcctgctatgggtactgctgctctgggttccaggttccactggtgacgcggcccagccggccgaggtgcagctggtggagtctgggggaggcctggtcaagcctggggggtccctgagactctcctgtgcagcctctggattcaccttcagtaggtatggcatgagctgggtccgccaggctccagggaagaggctggagtgggtctcaaccattagtggcggaggcacctacatatactacccagactcagtgaagggccgattcaccatctccagagacaacgccaagaacaccctgtatctgcaaatgaacagcctgagagccgaggacacggctgtgtattactgtaccagagataactatggccgcaactatgattatggcatggattattggggccagggcaccctggtgaccgtgagcagcggcggtggcggatccggcggtggcggatccggcggtggcggatccgaaattgtgttgacacagtctccagccaccctgtctttgtctccaggggaaagagccaccctcacctgcagcgccaccagcagtgttagctacatccactggtaccaacagaggcctggccagagccccaggctcctcatctatagcacctccaacctggccagcggcatcccagccaggttcagtggcagtgggtctgggagcgactacactctcaccatcagcagcctagagcctgaagattttgcagtttattactgtcagcagcgtagcagctcccctttcacctttggcagcggcaccaaagtggaaattaaagagcccaaatcttgtgacaaaactcacacatgcccaccgtgcccagcacctgaactcctggggggaccgtcagtcttcctcttccccccaaaacccaaggacaccctcatgatctcccggacccctgaggtcacatgcgtggtggtggacgtgagccacgaagaccctgaggtcaagttcaactggtacgtggacggcgtggaggtgcataatgccaagacaaagccgcgggaggagcagtacaacagcacgtaccgtgtggtcagcgtcctcaccgtcctgcaccaggactggctgaatggcaaggagtacaagtgcaaggtctccaacaaagccctcccagcccccatcgagaaaaccatctccaaagccaaagggcagccccgagaaccacaggtgtacaccctgcccccatcccgggaggagatgaccaagaaccaggtcagcctgacctgcctggtcaaaggcttctatcccagcgacatcgccgtggagtgggagagcaatgggcagccggagaacaactacaagaccacgcctcccgtgctggactccgacggctccttcttcctctacagcaagctcaccgtggacaagagcaggtggcagcaggggaacgtcttctcatgctccgtgatgcatgaggctctgcacaaccactacacgcagaagagcctctccctgtctccgggtaaatgataa

SEQ ID NO: 257 - protein, 501 aa, synthetic construct
  REGION 1..501: note = pSECTag2 E6 scFV-FC
METDTLLLWVLLLWVPGSTGDAAQPAEVQLVESGGGLVKPGGSLRLSCAASGFTFSRYGMSWVRQAPGKRLEWVSTISGGGTYIYYPDSVKGRFTISRDNAKNTLYLQMNSLRAEDTAVYYCTRDNYGRNYDYGMDYWGQGTLVTVSSGGGGSGGGGSGGGGSEIVLTQSPATLSLSPGERATLTCSATSSVSYIHWYQQRPGQSPRLLIYSTSNLASGIPARFSGSGSGSDYTLTISSLEPEDFAVYYCQQRSSSPFTFGSGTKVEIKEPKSCDKTHTCPPCPAPELLGGPSVFLFPPKPKDTLMISRTPEVTCVVVDVSHEDPEVKFNWYVDGVEVHNAKTKPREEQYNSTYRVVSVLTVLHQDWLNGKEYKCKVSNKALPAPIEKTISKAKGQPREPQVYTLPPSREEMTKNQVSLTCLVKGFYPSDIAVEWESNGQPENNYKTTPPVLDSDGSFFLYSKLTVDKSRWQQGNVFSCSVMHEALHNHYTQKSLSLSPGK

SEQ ID NO: 258 - DNA, 496 bp, synthetic construct
  misc_feature 1..496: note = E6 scFC-FC 1 gBLOCk sequence
  source 1..496: mol_type = other DNA
tgctctgggttccaggttccactggtgacgcggcccagccggccgaggtgcagctggtggagtctgggggaggcctggtcaagcctggggggtccctgagactctcctgtgcagcctctggattcaccttcagtaggtatggcatgagctgggtccgccaggctccagggaagaggctggagtgggtctcaaccattagtggcggaggcacctacatatactacccagactcagtgaagggccgattcaccatctccagagacaacgccaagaacaccctgtatctgcaaatgaacagcctgagagccgaggacacggctgtgtattactgtaccagagataactatggccgcaactatgattatggcatggattattggggccagggcaccctggtgaccgtgagcagcggcggtggcggatccggcggtggcggatccggcggtggcggatccgaaattgtgttgacacagtctccagccaccctgtctttgtc

SEQ ID NO: 259 - DNA, 583 bp, synthetic construct
  misc_feature 1..583: note = E6 scFC-FC 2 gBLOCk sequence
  source 1..583: mol_type = other DNA
aattgtgttgacacagtctccagccaccctgtctttgtctccaggggaaagagccaccctcacctgcagcgccaccagcagtgttagctacatccactggtaccaacagaggcctggccagagccccaggctcctcatctatagcacctccaacctggccagcggcatcccagccaggttcagtggcagtgggtctgggagcgactacactctcaccatcagcagcctagagcctgaagattttgcagtttattactgtcagcagcgtagcagctcccctttcacctttggcagcggcaccaaagtggaaattaaagagcccaaatcttgtgacaaaactcacacatgcccaccgtgcccagcacctgaactcctggggggaccgtcagtcttcctcttccccccaaaacccaaggacaccctcatgatctcccggacccctgaggtcacatgcgtggtggtggacgtgagccacgaagaccctgaggtcaagttcaactggtacgtggacggcgtggaggtgcataatgccaagacaaagccgcgggaggagcagtacaacagcacgtaccgtgtggtcagc

SEQ ID NO: 260 - DNA, 1527 bp, synthetic construct
  misc_feature 1..1527: note = pSECTag2 C2 scFV-FC
  source 1..1527: mol_type = other DNA
atggagacagacacactcctgctatgggtactgctgctctgggttccaggttccactggtgacgcggcccagccggccgaggtgcagctggtggagtctgggggaggcctggtcaagcctggggggtccctgagactctcctgtgcagcctctggattcaccttcagtggctatgccatgagctgggtccgccaggctccagggaaggggctggagtgggtctcaaccattagtagtggcggaacctacatatactaccccgactcagtgaagggccgattcaccatctccagagacaacgccaagaactcactgtatctgcaaatgaacagcctgagagccgaggacacggccgtgtattactgtgcgagacttgggggggataattactacgaatacttcgatgtctggggcaaagggaccacggtcaccgtctcctccggcggtggcggatccggcggtggcggatccggcggtggcggatccgacattgtgctgacccagtctccagcctccttggccgtgtctccaggacagagggccaccatcacctgcagagccagtaagagtgtcagtaccagcggatactcctacatgcactggtatcagcagaaaccaggacaacctcctaaactcctgatttacctggcatccaatctggagagcggggtcccagccaggttcagcggcagtgggtctgggaccgatttcaccctcacaattaatcctgtggaagctaatgatactgcaaattattactgtcagcacagtagggagctgcctttcacattcggcggagggaccaaggtggagatcaaacgaactgagcccaaatcttgtgacaaaactcacacatgcccaccgtgcccagcacctgaactcctggggggaccgtcagtcttcctcttccccccaaaacccaaggacaccctcatgatctcccggacccctgaggtcacatgcgtggtggtggacgtgagccacgaagaccctgaggtcaagttcaactggtacgtggacggcgtggaggtgcataatgccaagacaaagccgcgggaggagcagtacaacagcacgtaccgtgtggtcagcgtcctcaccgtcctgcaccaggactggctgaatggcaaggagtacaagtgcaaggtctccaacaaagccctcccagcccccatcgagaaaaccatctccaaagccaaagggcagccccgagaaccacaggtgtacaccctgcccccatcccgggaggagatgaccaagaaccaggtcagcctgacctgcctggtcaaaggcttctatcccagcgacatcgccgtggagtgggagagcaatgggcagccggagaacaactacaagaccacgcctcccgtgctggactccgacggctccttcttcctctacagcaagctcaccgtggacaagagcaggtggcagcaggggaacgtcttctcatgctccgtgatgcatgaggctctgcacaaccactacacgcagaagagcctctccctgtctccgggtaaatgataa

SEQ ID NO: 261 - protein, 507 aa, synthetic construct
  REGION 1..507: note = pSECTag2 C2 scFV-FC
METDTLLLWVLLLWVPGSTGDAAQPAEVQLVESGGGLVKPGGSLRLSCAASGFTFSGYAMSWVRQAPGKGLEWVSTISSGGTYIYYPDSVKGRFTISRDNAKNSLYLQMNSLRAEDTAVYYCARLGGDNYYEYFDVWGKGTTVTVSSGGGGSGGGGSGGGGSDIVLTQSPASLAVSPGQRATITCRASKSVSTSGYSYMHWYQQKPGQPPKLLIYLASNLESGVPARFSGSGSGTDFTLTINPVEANDTANYYCQHSRELPFTFGGGTKVEIKRTEPKSCDKTHTCPPCPAPELLGGPSVFLFPPKPKDTLMISRTPEVTCVVVDVSHEDPEVKFNWYVDGVEVHNAKTKPREEQYNSTYRVVSVLTVLHQDWLNGKEYKCKVSNKALPAPIEKTISKAKGQPREPQVYTLPPSREEMTKNQVSLTCLVKGFYPSDIAVEWESNGQPENNYKTTPPVLDSDGSFFLYSKLTVDKSRWQQGNVFSCSVMHEALHNHYTQKSLSLSPGK

SEQ ID NO: 262 - DNA, 487 bp, synthetic construct
  misc_feature 1..487: note = C2 scFV-FC 1 gBLOCk sequence
  source 1..487: mol_type = other DNA
tgctctgggttccaggttccactggtgacgcggcccagccggccgaggtgcagctggtggagtctgggggaggcctggtcaagcctggggggtccctgagactctcctgtgcagcctctggattcaccttcagtggctatgccatgagctgggtccgccaggctccagggaaggggctggagtgggtctcaaccattagtagtggcggaacctacatatactaccccgactcagtgaagggccgattcaccatctccagagacaacgccaagaactcactgtatctgcaaatgaacagcctgagagccgaggacacggccgtgtattactgtgcgagacttgggggggataattactacgaatacttcgatgtctggggcaaagggaccacggtcaccgtctcctccggcggtggcggatccggcggtggcggatccggcggtggcggatccgacattgtgctgacccagtctccagcctccttggc

SEQ ID NO: 263 - DNA, 604 bp, synthetic construct
  misc_feature 1..604: note = C2 scFV-FC 2 gBLOCk sequence
  source 1..604: mol_type = other DNA
cattgtgctgacccagtctccagcctccttggccgtgtctccaggacagagggccaccatcacctgcagagccagtaagagtgtcagtaccagcggatactcctacatgcactggtatcagcagaaaccaggacaacctcctaaactcctgatttacctggcatccaatctggagagcggggtcccagccaggttcagcggcagtgggtctgggaccgatttcaccctcacaattaatcctgtggaagctaatgatactgcaaattattactgtcagcacagtagggagctgcctttcacattcggcggagggaccaaggtggagatcaaacgaactgagcccaaatcttgtgacaaaactcacacatgcccaccgtgcccagcacctgaactcctggggggaccgtcagtcttcctcttccccccaaaacccaaggacaccctcatgatctcccggacccctgaggtcacatgcgtggtggtggacgtgagccacgaagaccctgaggtcaagttcaactggtacgtggacggcgtggaggtgcataatgccaagacaaagccgcgggaggagcagtacaacagcacgtaccgtgtggtcagc

SEQ ID NO: 264 - DNA, 1524 bp, synthetic construct
  misc_feature 1..1524: note = pSECTag2 C3 scFV-FC
  source 1..1524: mol_type = other DNA
atggagacagacacactcctgctatgggtactgctgctctgggttccaggttccactggtgacgcggcccagccggcccaggttcagctggtgcagtctggagctgaggtgaagaagcctggggcctcagtgaaggtctcctgcaaggcttctggttacacctttaccgactacgccatgaactgggtgcgacaggcccctggacaagggcttgagtggatgggagtgatcagcaccttcagcggtaacacaaacttcaaccagaagttcaagggcagagtcaccatgaccacagacacatccacgagcacagcctacatggagctgaggagcctgagatctgacgacacggccgtgtattactgtgcgagaagcgactactacggcccatacttcgactactggggccagggcaccaccctgaccgtgtccagcggcggtggcggatccggcggtggcggatccggcggtggcggatccgatattgtgatgacccagactccactctctctgtccgtcacccctggacagccggcctccatctcctgcaggtctagtcagaccattgtccatagtaatggaaacacctatttggagtggtacctgcagaagccaggccagtctccacagctcctgatctataaggtttccaaccggttctctggagtgccagataggttcagtggcagcgggtcagggacagatttcacactgaaaatcagccgggtggaggctgaggatgttggggtttattactgcttccaaggtagccacgtgcctttcaccttcggcggagggaccaaggtggagatcaaacgaactgagcccaaatcttgtgacaaaactcacacatgcccaccgtgcccagcacctgaactcctggggggaccgtcagtcttcctcttccccccaaaacccaaggacaccctcatgatctcccggacccctgaggtcacatgcgtggtggtggacgtgagccacgaagaccctgaggtcaagttcaactggtacgtggacggcgtggaggtgcataatgccaagacaaagccgcgggaggagcagtacaacagcacgtaccgtgtggtcagcgtcctcaccgtcctgcaccaggactggctgaatggcaaggagtacaagtgcaaggtctccaacaaagccctcccagcccccatcgagaaaaccatctccaaagccaaagggcagccccgagaaccacaggtgtacaccctgcccccatcccgggaggagatgaccaagaaccaggtcagcctgacctgcctggtcaaaggcttctatcccagcgacatcgccgtggagtgggagagcaatgggcagccggagaacaactacaagaccacgcctcccgtgctggactccgacggctccttcttcctctacagcaagctcaccgtggacaagagcaggtggcagcaggggaacgtcttctcatgctccgtgatgcatgaggctctgcacaaccactacacgcagaagagcctctccctgtctccgggtaaatgataa

SEQ ID NO: 265 - protein, 506 aa, synthetic construct
  REGION 1..506: note = pSECTag2 C3 scFV-FC
METDTLLLWVLLLWVPGSTGDAAQPAQVQLVQSGAEVKKPGASVKVSCKASGYTFTDYAMNWVRQAPGQGLEWMGVISTFSGNTNFNQKFKGRVTMTTDTSTSTAYMELRSLRSDDTAVYYCARSDYYGPYFDYWGQGTTLTVSSGGGGSGGGGSGGGGSDIVMTQTPLSLSVTPGQPASISCRSSQTIVHSNGNTYLEWYLQKPGQSPQLLIYKVSNRFSGVPDRFSGSGSGTDFTLKISRVEAEDVGVYYCFQGSHVPFTFGGGTKVEIKRTEPKSCDKTHTCPPCPAPELLGGPSVFLFPPKPKDTLMISRTPEVTCVVVDVSHEDPEVKFNWYVDGVEVHNAKTKPREEQYNSTYRVVSVLTVLHQDWLNGKEYKCKVSNKALPAPIEKTISKAKGQPREPQVYTLPPSREEMTKNQVSLTCLVKGFYPSDIAVEWESNGQPENNYKTTPPVLDSDGSFFLYSKLTVDKSRWQQGNVFSCSVMHEALHNHYTQKSLSLSPGK

SEQ ID NO: 266 - DNA, 480 bp, synthetic construct
  misc_feature 1..480: note = C3 GS scFV FC 1 gBLOCk sequence
  source 1..480: mol_type = other DNA
tgctctgggttccaggttccactggtgacgcggcccagccggcccaggttcagctggtgcagtctggagctgaggtgaagaagcctggggcctcagtgaaggtctcctgcaaggcttctggttacacctttaccgactacgccatgaactgggtgcgacaggcccctggacaagggcttgagtggatgggagtgatcagcaccttcagcggtaacacaaacttcaaccagaagttcaagggcagagtcaccatgaccacagacacatccacgagcacagcctacatggagctgaggagcctgagatctgacgacacggccgtgtattactgtgcgagaagcgactactacggcccatacttcgactactggggccagggcaccaccctgaccgtgtccagcggcggtggcggatccggcggtggcggatccggcggtggcggatccgatattgtgatgacccagactccactctctctgt

SEQ ID NO: 267 - DNA, 607 bp, synthetic construct
  misc_feature 1..607: note = C3 scFV FC2 gBLOCk sequence
  source 1..607: mol_type = other DNA
tattgtgatgacccagactccactctctctgtccgtcacccctggacagccggcctccatctcctgcaggtctagtcagaccattgtccatagtaatggaaacacctatttggagtggtacctgcagaagccaggccagtctccacagctcctgatctataaggtttccaaccggttctctggagtgccagataggttcagtggcagcgggtcagggacagatttcacactgaaaatcagccgggtggaggctgaggatgttggggtttattactgcttccaaggtagccacgtgcctttcaccttcggcggagggaccaaggtggagatcaaacgaactgagcccaaatcttgtgacaaaactcacacatgcccaccgtgcccagcacctgaactcctggggggaccgtcagtcttcctcttccccccaaaacccaaggacaccctcatgatctcccggacccctgaggtcacatgcgtggtggtggacgtgagccacgaagaccctgaggtcaagttcaactggtacgtggacggcgtggaggtgcataatgccaagacaaagccgcgggaggagcagtacaacagcacgtaccgtgtggtcagc

SEQ ID NO: 268 - DNA, 1521 bp, synthetic construct
  misc_feature 1..1521: note = pSECTag2 C8 scFV-FC
  source 1..1521: mol_type = other DNA
atggagacagacacactcctgctatgggtactgctgctctgggttccaggttccactggtgacgcggcccagccggccgaggtgcagctggtggagtctgggggaggcctggtcaagcctggggggtccctgagactctcctgtgcagcctctggattcaccttcagtggctatgccatgagctgggtccgccaggctccagggaaggggctggagtgggtctcaaccattagtagtggcggaacctacatatactaccctgactcagtgaagggccgattcaccatctccagagacaacgccaagaactcactgtatctgcaaatgaacagcctgagagccgaggacacggccgtgtattactgtgcgagactgggcggcgataactattatgaatattggggcaaagggaccacggtcaccgtctcctccggcggtggcggatccggcggtggcggatccggcggtggcggatccgacatcgtgatgacccagtctccagactccctggctgtgtctctgggcgagagggccaccatcaactgcagggccagcaagagtgttagcaccagcggctacagctacatgcactggtaccagcagaaaccaggacagcctcctaagctgctcatttacctggtgtctaacctggaatccggggtccctgaccgattcagtggcagcgggtctgggacagatttcactctcaccatcagcagcctgcaggctgaagatgtggcagtttattactgtcaacacattcgggaactgaccaggagtgaattcggcggagggaccaaggtggagatcaaacgaactgagcccaaatcttgtgacaaaactcacacatgcccaccgtgcccagcacctgaactcctggggggaccgtcagtcttcctcttccccccaaaacccaaggacaccctcatgatctcccggacccctgaggtcacatgcgtggtggtggacgtgagccacgaagaccctgaggtcaagttcaactggtacgtggacggcgtggaggtgcataatgccaagacaaagccgcgggaggagcagtacaacagcacgtaccgtgtggtcagcgtcctcaccgtcctgcaccaggactggctgaatggcaaggagtacaagtgcaaggtctccaacaaagccctcccagcccccatcgagaaaaccatctccaaagccaaagggcagccccgagaaccacaggtgtacaccctgcccccatcccgggaggagatgaccaagaaccaggtcagcctgacctgcctggtcaaaggcttctatcccagcgacatcgccgtggagtgggagagcaatgggcagccggagaacaactacaagaccacgcctcccgtgctggactccgacggctccttcttcctctacagcaagctcaccgtggacaagagcaggtggcagcaggggaacgtcttctcatgctccgtgatgcatgaggctctgcacaaccactacacgcagaagagcctctccctgtctccgggtaaatgataa

SEQ ID NO: 269 - protein, 505 aa, synthetic construct
  REGION 1..505: note = pSECTag2 C8 scFV-FC
METDTLLLWVLLLWVPGSTGDAAQPAEVQLVESGGGLVKPGGSLRLSCAASGFTFSGYAMSWVRQAPGKGLEWVSTISSGGTYIYYPDSVKGRFTISRDNAKNSLYLQMNSLRAEDTAVYYCARLGGDNYYEYWGKGTTVTVSSGGGGSGGGGSGGGGSDIVMTQSPDSLAVSLGERATINCRASKSVSTSGYSYMHWYQQKPGQPPKLLIYLVSNLESGVPDRFSGSGSGTDFTLTISSLQAEDVAVYYCQHIRELTRSEFGGGTKVEIKRTEPKSCDKTHTCPPCPAPELLGGPSVFLFPPKPKDTLMISRTPEVTCVVVDVSHEDPEVKFNWYVDGVEVHNAKTKPREEQYNSTYRVVSVLTVLHQDWLNGKEYKCKVSNKALPAPIEKTISKAKGQPREPQVYTLPPSREEMTKNQVSLTCLVKGFYPSDIAVEWESNGQPENNYKTTPPVLDSDGSFFLYSKLTVDKSRWQQGNVFSCSVMHEALHNHYTQKSLSLSPGK

SEQ ID NO: 270 - DNA, 477 bp, synthetic construct
  misc_feature 1..477: note = C8 scFV FC 1 gBLOCk sequence
  source 1..477: mol_type = other DNA
tgctctgggttccaggttccactggtgacgcggcccagccggccgaggtgcagctggtggagtctgggggaggcctggtcaagcctggggggtccctgagactctcctgtgcagcctctggattcaccttcagtggctatgccatgagctgggtccgccaggctccagggaaggggctggagtgggtctcaaccattagtagtggcggaacctacatatactaccctgactcagtgaagggccgattcaccatctccagagacaacgccaagaactcactgtatctgcaaatgaacagcctgagagccgaggacacggccgtgtattactgtgcgagactgggcggcgataactattatgaatattggggcaaagggaccacggtcaccgtctcctccggcggtggcggatccggcggtggcggatccggcggtggcggatccgacatcgtgatgacccagtctccagactccctgg

SEQ ID NO: 271 - DNA, 607 bp, synthetic construct
  misc_feature 1..607: note = C8 scFV FC2 gBLOCk sequence
  source 1..607: mol_type = other DNA
catcgtgatgacccagtctccagactccctggctgtgtctctgggcgagagggccaccatcaactgcagggccagcaagagtgttagcaccagcggctacagctacatgcactggtaccagcagaaaccaggacagcctcctaagctgctcatttacctggtgtctaacctggaatccggggtccctgaccgattcagtggcagcgggtctgggacagatttcactctcaccatcagcagcctgcaggctgaagatgtggcagtttattactgtcaacacattcgggaactgaccaggagtgaattcggcggagggaccaaggtggagatcaaacgaactgagcccaaatcttgtgacaaaactcacacatgcccaccgtgcccagcacctgaactcctggggggaccgtcagtcttcctcttccccccaaaacccaaggacaccctcatgatctcccggacccctgaggtcacatgcgtggtggtggacgtgagccacgaagaccctgaggtcaagttcaactggtacgtggacggcgtggaggtgcataatgccaagacaaagccgcgggaggagcagtacaacagcacgtaccgtgtggtcagc

SEQ ID NO: 272 - DNA, 702 bp, synthetic construct
  misc_feature 1..702: note = Human IgG1 Fc sequence
  source 1..702: mol_type = other DNA
gagcccaaatcttgtgacaaaactcacacatgcccaccgtgcccagcacctgaactcctggggggaccgtcagtcttcctcttccccccaaaacccaaggacaccctcatgatctcccggacccctgaggtcacatgcgtggtggtggacgtgagccacgaagaccctgaggtcaagttcaactggtacgtggacggcgtggaggtgcataatgccaagacaaagccgcgggaggagcagtacaacagcacgtaccgtgtggtcagcgtcctcaccgtcctgcaccaggactggctgaatggcaaggagtacaagtgcaaggtctccaacaaagccctcccagcccccatcgagaaaaccatctccaaagccaaagggcagccccgagaaccacaggtgtacaccctgcccccatcccgggaggagatgaccaagaaccaggtcagcctgacctgcctggtcaaaggcttctatcccagcgacatcgccgtggagtgggagagcaatgggcagccggagaacaactacaagaccacgcctcccgtgctggactccgacggctccttcttcctctacagcaagctcaccgtggacaagagcaggtggcagcaggggaacgtcttctcatgctccgtgatgcatgaggctctgcacaaccactacacgcagaagagcctctccctgtctccgggtaaatgataa

SEQ ID NO: 273 - protein, 232 aa, synthetic construct
  REGION 1..232: note = Human IgG1 Fc sequence
EPKSCDKTHTCPPCPAPELLGGPSVFLFPPKPKDTLMISRTPEVTCVVVDVSHEDPEVKFNWYVDGVEVHNAKTKPREEQYNSTYRVVSVLTVLHQDWLNGKEYKCKVSNKALPAPIEKTISKAKGQPREPQVYTLPPSREEMTKNQVSLTCLVKGFYPSDIAVEWESNGQPENNYKTTPPVLDSDGSFFLYSKLTVDKSRWQQGNVFSCSVMHEALHNHYTQKSLSLSPGK

SEQ ID NO: 274 - DNA, 666 bp, synthetic construct
  misc_feature 1..666: note = Human IgG1 CH2-CH3 domain sequence
  source 1..666: mol_type = other DNA
ccgtgcccagcacctgaactcctggggggaccgtcagtcttcctcttccccccaaaacccaaggacaccctcatgatctcccggacccctgaggtcacatgcgtggtggtggacgtgagccacgaagaccctgaggtcaagttcaactggtacgtggacggcgtggaggtgcataatgccaagacaaagccgcgggaggagcagtacaacagcacgtaccgtgtggtcagcgtcctcaccgtcctgcaccaggactggctgaatggcaaggagtacaagtgcaaggtctccaacaaagccctcccagcccccatcgagaaaaccatctccaaagccaaagggcagccccgagaaccacaggtgtacaccctgcccccatcccgggaggagatgaccaagaaccaggtcagcctgacctgcctggtcaaaggcttctatcccagcgacatcgccgtggagtgggagagcaatgggcagccggagaacaactacaagaccacgcctcccgtgctggactccgacggctccttcttcctctacagcaagctcaccgtggacaagagcaggtggcagcaggggaacgtcttctcatgctccgtgatgcatgaggctctgcacaaccactacacgcagaagagcctctccctgtctccgggtaaatgataa

SEQ ID NO: 275 - protein, 220 aa, synthetic construct
  REGION 1..220: note = Human IgG1 CH2-CH3 domain sequence
PCPAPELLGGPSVFLFPPKPKDTLMISRTPEVTCVVVDVSHEDPEVKFNWYVDGVEVHNAKTKPREEQYNSTYRVVSVLTVLHQDWLNGKEYKCKVSNKALPAPIEKTISKAKGQPREPQVYTLPPSREEMTKNQVSLTCLVKGFYPSDIAVEWESNGQPENNYKTTPPVLDSDGSFFLYSKLTVDKSRWQQGNVFSCSVMHEALHNHYTQKSLSLSPGK

SEQ ID NO: 276 - DNA, 327 bp, synthetic construct
  misc_feature 1..327: note = Human IgG1 CH3 domain sequence
  source 1..327: mol_type = other DNA
gggcagccccgagaaccacaggtgtacaccctgcccccatcccgggaggagatgaccaagaaccaggtcagcctgacctgcctggtcaaaggcttctatcccagcgacatcgccgtggagtgggagagcaatgggcagccggagaacaactacaagaccacgcctcccgtgctggactccgacggctccttcttcctctacagcaagctcaccgtggacaagagcaggtggcagcaggggaacgtcttctcatgctccgtgatgcatgaggctctgcacaaccactacacgcagaagagcctctccctgtctccgggtaaatgataa

SEQ ID NO: 277 - protein, 107 aa, synthetic construct
  REGION 1..107: note = Human IgG1 CH3 domain sequence
GQPREPQVYTLPPSREEMTKNQVSLTCLVKGFYPSDIAVEWESNGQPENNYKTTPPVLDSDGSFFLYSKLTVDKSRWQQGNVFSCSVMHEALHNHYTQKSLSLSPGK

SEQ ID NO: 278 - DNA, 702 bp, synthetic construct
  misc_feature 1..702: note = Human IgG1 Fc Y407R sequence
  source 1..702: mol_type = other DNA
gagcccaaatcttgtgacaaaactcacacatgcccaccgtgcccagcacctgaactcctggggggaccgtcagtcttcctcttccccccaaaacccaaggacaccctcatgatctcccggacccctgaggtcacatgcgtggtggtggacgtgagccacgaagaccctgaggtcaagttcaactggtacgtggacggcgtggaggtgcataatgccaagacaaagccgcgggaggagcagtacaacagcacgtaccgtgtggtcagcgtcctcaccgtcctgcaccaggactggctgaatggcaaggagtacaagtgcaaggtctccaacaaagccctcccagcccccatcgagaaaaccatctccaaagccaaagggcagccccgagaaccacaggtgtacaccctgcccccatcccgggaggagatgaccaagaaccaggtcagcctgacctgcctggtcaaaggcttctatcccagcgacatcgccgtggagtgggagagcaatgggcagccggagaacaactacaagaccacgcctcccgtgctggactccgacggctccttcttcctcaggagcaagctcaccgtggacaagagcaggtggcagcaggggaacgtcttctcatgctccgtgatgcatgaggctctgcacaaccactacacgcagaagagcctctccctgtctccgggtaaatgataa

SEQ ID NO: 279 - protein, 232 aa, synthetic construct
  REGION 1..232: note = Human IgG1 Fc Y407R sequence
EPKSCDKTHTCPPCPAPELLGGPSVFLFPPKPKDTLMISRTPEVTCVVVDVSHEDPEVKFNWYVDGVEVHNAKTKPREEQYNSTYRVVSVLTVLHQDWLNGKEYKCKVSNKALPAPIEKTISKAKGQPREPQVYTLPPSREEMTKNQVSLTCLVKGFYPSDIAVEWESNGQPENNYKTTPPVLDSDGSFFLRSKLTVDKSRWQQGNVFSCSVMHEALHNHYTQKSLSLSPGK

SEQ ID NO: 280 - DNA, 702 bp, synthetic construct
  misc_feature 1..702: note = Human IgG1 Fc F405Q sequence
  source 1..702: mol_type = other DNA
gagcccaaatcttgtgacaaaactcacacatgcccaccgtgcccagcacctgaactcctggggggaccgtcagtcttcctcttccccccaaaacccaaggacaccctcatgatctcccggacccctgaggtcacatgcgtggtggtggacgtgagccacgaagaccctgaggtcaagttcaactggtacgtggacggcgtggaggtgcataatgccaagacaaagccgcgggaggagcagtacaacagcacgtaccgtgtggtcagcgtcctcaccgtcctgcaccaggactggctgaatggcaaggagtacaagtgcaaggtctccaacaaagccctcccagcccccatcgagaaaaccatctccaaagccaaagggcagccccgagaaccacaggtgtacaccctgcccccatcccgggaggagatgaccaagaaccaggtcagcctgacctgcctggtcaaaggcttctatcccagcgacatcgccgtggagtgggagagcaatgggcagccggagaacaactacaagaccacgcctcccgtgctggactccgacggctccttccagctctacagcaagctcaccgtggacaagagcaggtggcagcaggggaacgtcttctcatgctccgtgatgcatgaggctctgcacaaccactacacgcagaagagcctctccctgtctccgggtaaatgataa

SEQ ID NO: 281 - protein, 232 aa, synthetic construct
  REGION 1..232: note = Human IgG1 Fc F405Q sequence
EPKSCDKTHTCPPCPAPELLGGPSVFLFPPKPKDTLMISRTPEVTCVVVDVSHEDPEVKFNWYVDGVEVHNAKTKPREEQYNSTYRVVSVLTVLHQDWLNGKEYKCKVSNKALPAPIEKTISKAKGQPREPQVYTLPPSREEMTKNQVSLTCLVKGFYPSDIAVEWESNGQPENNYKTTPPVLDSDGSFQLYSKLTVDKSRWQQGNVFSCSVMHEALHNHYTQKSLSLSPGK

SEQ ID NO: 282 - DNA, 702 bp, synthetic construct
  misc_feature 1..702: note = Human IgG1 Fc T394D sequence
  source 1..702: mol_type = other DNA
gagcccaaatcttgtgacaaaactcacacatgcccaccgtgcccagcacctgaactcctggggggaccgtcagtcttcctcttccccccaaaacccaaggacaccctcatgatctcccggacccctgaggtcacatgcgtggtggtggacgtgagccacgaagaccctgaggtcaagttcaactggtacgtggacggcgtggaggtgcataatgccaagacaaagccgcgggaggagcagtacaacagcacgtaccgtgtggtcagcgtcctcaccgtcctgcaccaggactggctgaatggcaaggagtacaagtgcaaggtctccaacaaagccctcccagcccccatcgagaaaaccatctccaaagccaaagggcagccccgagaaccacaggtgtacaccctgcccccatcccgggaggagatgaccaagaaccaggtcagcctgacctgcctggtcaaaggcttctatcccagcgacatcgccgtggagtgggagagcaatgggcagccggagaacaactacaagaccgaccctcccgtgctggactccgacggctccttcttcctctacagcaagctcaccgtggacaagagcaggtggcagcaggggaacgtcttctcatgctccgtgatgcatgaggctctgcacaaccactacacgcagaagagcctctccctgtctccgggtaaatgataa

SEQ ID NO: 283 - protein, 232 aa, synthetic construct
  REGION 1..232: note = Human IgG1 Fc T394D sequence
EPKSCDKTHTCPPCPAPELLGGPSVFLFPPKPKDTLMISRTPEVTCVVVDVSHEDPEVKFNWYVDGVEVHNAKTKPREEQYNSTYRVVSVLTVLHQDWLNGKEYKCKVSNKALPAPIEKTISKAKGQPREPQVYTLPPSREEMTKNQVSLTCLVKGFYPSDIAVEWESNGQPENNYKTDPPVLDSDGSFFLYSKLTVDKSRWQQGNVFSCSVMHEALHNHYTQKSLSLSPGK

SEQ ID NO: 284 - DNA, 702 bp, synthetic construct
  misc_feature 1..702: note = Human IgG1 Fc T366W/L368W sequence
  source 1..702: mol_type = other DNA
gagcccaaatcttgtgacaaaactcacacatgcccaccgtgcccagcacctgaactcctggggggaccgtcagtcttcctcttccccccaaaacccaaggacaccctcatgatctcccggacccctgaggtcacatgcgtggtggtggacgtgagccacgaagaccctgaggtcaagttcaactggtacgtggacggcgtggaggtgcataatgccaagacaaagccgcgggaggagcagtacaacagcacgtaccgtgtggtcagcgtcctcaccgtcctgcaccaggactggctgaatggcaaggagtacaagtgcaaggtctccaacaaagccctcccagcccccatcgagaaaaccatctccaaagccaaagggcagccccgagaaccacaggtgtacaccctgcccccatcccgggaggagatgaccaagaaccaggtcagcctgtggtgctgggtcaaaggcttctatcccagcgacatcgccgtggagtgggagagcaatgggcagccggagaacaactacaagaccacgcctcccgtgctggactccgacggctccttcttcctctacagcaagctcaccgtggacaagagcaggtggcagcaggggaacgtcttctcatgctccgtgatgcatgaggctctgcacaaccactacacgcagaagagcctctccctgtctccgggtaaatgataa

SEQ ID NO: 285 - protein, 232 aa, synthetic construct
  REGION 1..232: note = Human IgG1 Fc T366W/L368W sequence
EPKSCDKTHTCPPCPAPELLGGPSVFLFPPKPKDTLMISRTPEVTCVVVDVSHEDPEVKFNWYVDGVEVHNAKTKPREEQYNSTYRVVSVLTVLHQDWLNGKEYKCKVSNKALPAPIEKTISKAKGQPREPQVYTLPPSREEMTKNQVSLWCWVKGFYPSDIAVEWESNGQPENNYKTTPPVLDSDGSFFLYSKLTVDKSRWQQGNVFSCSVMHEALHNHYTQKSLSLSPGK

SEQ ID NO: 286 - DNA, 702 bp, synthetic construct
  misc_feature 1..702: note = Human IgG1 Fc T364R/L368R sequence
  source 1..702: mol_type = other DNA
gagcccaaatcttgtgacaaaactcacacatgcccaccgtgcccagcacctgaactcctggggggaccgtcagtcttcctcttccccccaaaacccaaggacaccctcatgatctcccggacccctgaggtcacatgcgtggtggtggacgtgagccacgaagaccctgaggtcaagttcaactggtacgtggacggcgtggaggtgcataatgccaagacaaagccgcgggaggagcagtacaacagcacgtaccgtgtggtcagcgtcctcaccgtcctgcaccaggactggctgaatggcaaggagtacaagtgcaaggtctccaacaaagccctcccagcccccatcgagaaaaccatctccaaagccaaagggcagccccgagaaccacaggtgtacaccctgcccccatcccgggaggagatgaccaagaaccaggtcaggctgacctgcagggtcaaaggcttctatcccagcgacatcgccgtggagtgggagagcaatgggcagccggagaacaactacaagaccacgcctcccgtgctggactccgacggctccttcttcctctacagcaagctcaccgtggacaagagcaggtggcagcaggggaacgtcttctcatgctccgtgatgcatgaggctctgcacaaccactacacgcagaagagcctctccctgtctccgggtaaatgataa

SEQ ID NO: 287 - protein, 232 aa, synthetic construct
  REGION 1..232: note = Human IgG1 Fc T364R/L368R sequence
EPKSCDKTHTCPPCPAPELLGGPSVFLFPPKPKDTLMISRTPEVTCVVVDVSHEDPEVKFNWYVDGVEVHNAKTKPREEQYNSTYRVVSVLTVLHQDWLNGKEYKCKVSNKALPAPIEKTISKAKGQPREPQVYTLPPSREEMTKNQVRLTCRVKGFYPSDIAVEWESNGQPENNYKTTPPVLDSDGSFFLYSKLTVDKSRWQQGNVFSCSVMHEALHNHYTQKSLSLSPGK

SEQ ID NO: 288 - DNA, 657 bp, synthetic construct
  misc_feature 1..657: note = Human IgG1 Fc hingeless sequence
  source 1..657: mol_type = other DNA
gcacctgaactcctggggggaccgtcagtcttcctcttccccccaaaacccaaggacaccctcatgatctcccggacccctgaggtcacatgcgtggtggtggacgtgagccacgaagaccctgaggtcaagttcaactggtacgtggacggcgtggaggtgcataatgccaagacaaagccgcgggaggagcagtacaacagcacgtaccgtgtggtcagcgtcctcaccgtcctgcaccaggactggctgaatggcaaggagtacaagtgcaaggtctccaacaaagccctcccagcccccatcgagaaaaccatctccaaagccaaagggcagccccgagaaccacaggtgtacaccctgcccccatcccgggaggagatgaccaagaaccaggtcagcctgacctgcctggtcaaaggcttctatcccagcgacatcgccgtggagtgggagagcaatgggcagccggagaacaactacaagaccacgcctcccgtgctggactccgacggctccttcttcctctacagcaagctcaccgtggacaagagcaggtggcagcaggggaacgtcttctcatgctccgtgatgcatgaggctctgcacaaccactacacgcagaagagcctctccctgtctccgggtaaatgataa

SEQ ID NO: 289 - protein, 217 aa, synthetic construct
  REGION 1..217: note = Human IgG1 Fc hingeless sequence
APELLGGPSVFLFPPKPKDTLMISRTPEVTCVVVDVSHEDPEVKFNWYVDGVEVHNAKTKPREEQYNSTYRVVSVLTVLHQDWLNGKEYKCKVSNKALPAPIEKTISKAKGQPREPQVYTLPPSREEMTKNQVSLTCLVKGFYPSDIAVEWESNGQPENNYKTTPPVLDSDGSFFLYSKLTVDKSRWQQGNVFSCSVMHEALHNHYTQKSLSLSPGK

SEQ ID NO: 290 - DNA, 696 bp, synthetic construct
  misc_feature 1..696: note = Human IgG1 G237A FC sequence
  source 1..696: mol_type = other DNA
gagcccaaatcttgtgacaaaactcacacatgcccaccgtgcccagcacctgaactcctgggggccccgtcagtcttcctcttccccccaaaacccaaggacaccctcatgatctcccggacccctgaggtcacatgcgtggtggtggacgtgagccacgaagaccctgaggtcaagttcaactggtacgtggacggcgtggaggtgcataatgccaagacaaagccgcgggaggagcagtacaacagcacgtaccgtgtggtcagcgtcctcaccgtcctgcaccaggactggctgaatggcaaggagtacaagtgcaaggtctccaacaaagccctcccagcccccatcgagaaaaccatctccaaagccaaagggcagccccgagaaccacaggtgtacaccctgcccccatcccgggaggagatgaccaagaaccaggtcagcctgacctgcctggtcaaaggcttctatcccagcgacatcgccgtggagtgggagagcaatgggcagccggagaacaactacaagaccacgcctcccgtgctggactccgacggctccttcttcctctacagcaagctcaccgtggacaagagcaggtggcagcaggggaacgtcttctcatgctccgtgatgcatgaggctctgcacaaccactacacgcagaagagcctctccctgtctccgggtaaa

SEQ ID NO: 291 - protein, 232 aa, synthetic construct
  REGION 1..232: note = Human IgG1 G237A FC sequence
EPKSCDKTHTCPPCPAPELLGAPSVFLFPPKPKDTLMISRTPEVTCVVVDVSHEDPEVKFNWYVDGVEVHNAKTKPREEQYNSTYRVVSVLTVLHQDWLNGKEYKCKVSNKALPAPIEKTISKAKGQPREPQVYTLPPSREEMTKNQVSLTCLVKGFYPSDIAVEWESNGQPENNYKTTPPVLDSDGSFFLYSKLTVDKSRWQQGNVFSCSVMHEALHNHYTQKSLSLSPGK

SEQ ID NO: 292 - DNA, 696 bp, synthetic construct
  misc_feature 1..696: note = Human IgG1 L234A/L235A FC sequence
  source 1..696: mol_type = other DNA
gagcccaaatcttgtgacaaaactcacacatgcccaccgtgcccagcacctgaagccgccgggggaccgtcagtcttcctcttccccccaaaacccaaggacaccctcatgatctcccggacccctgaggtcacatgcgtggtggtggacgtgagccacgaagaccctgaggtcaagttcaactggtacgtggacggcgtggaggtgcataatgccaagacaaagccgcgggaggagcagtacaacagcacgtaccgtgtggtcagcgtcctcaccgtcctgcaccaggactggctgaatggcaaggagtacaagtgcaaggtctccaacaaagccctcccagcccccatcgagaaaaccatctccaaagccaaagggcagccccgagaaccacaggtgtacaccctgcccccatcccgggaggagatgaccaagaaccaggtcagcctgacctgcctggtcaaaggcttctatcccagcgacatcgccgtggagtgggagagcaatgggcagccggagaacaactacaagaccacgcctcccgtgctggactccgacggctccttcttcctctacagcaagctcaccgtggacaagagcaggtggcagcaggggaacgtcttctcatgctccgtgatgcatgaggctctgcacaaccactacacgcagaagagcctctccctgtctccgggtaaa

SEQ ID NO: 293 - protein, 232 aa, synthetic construct
  REGION 1..232: note = Human IgG1 L234A/L235A FC sequence
EPKSCDKTHTCPPCPAPEAAGGPSVFLFPPKPKDTLMISRTPEVTCVVVDVSHEDPEVKFNWYVDGVEVHNAKTKPREEQYNSTYRVVSVLTVLHQDWLNGKEYKCKVSNKALPAPIEKTISKAKGQPREPQVYTLPPSREEMTKNQVSLTCLVKGFYPSDIAVEWESNGQPENNYKTTPPVLDSDGSFFLYSKLTVDKSRWQQGNVFSCSVMHEALHNHYTQKSLSLSPGK

SEQ ID NO: 294 - DNA, 1341 bp, synthetic construct
  misc_feature 1..1341: note = CAR-T E6 CD3z sequence
  source 1..1341: mol_type = other DNA
atggccctgcccgtgaccgctttgctgctccccctggcgctgctgctgcacgccgccaggccagaggtccagctggttgagagtggcggtgggctggttaagcctggcggctccctgcggctgagctgcgccgcgagtggatttactttcagccgatatgggatgagttgggtgcggcaagctcccgggaagaggctggaatgggtctcaacaatctccggggggggcacttacatctattaccccgactcagtcaaggggagatttaccatttcacgagacaacgctaagaataccctgtatttgcagatgaattctctgagagcagaggacacagctgtttactattgtacccgcgacaactatggcaggaactacgactacggtatggactattggggacaagggacattggttacagtgagcagtggcggcgggggcagcggaggaggaggcagcggtggggggggcagcgagatagtgctcacgcagtcacccgcgactctcagtctctcacctggggaacgagctaccctgacgtgctctgctacctcctcagtgtcatatattcactggtatcagcaacggcccgggcagtcccctagattgctcatttatagtacctctaatctggcctcaggtatccctgcacgattttctggatctggttcaggttctgattacaccctcactatctctagcctggagcctgaagactttgccgtttattactgccagcagaggtctagctccccattcacctttgggagtgggaccaaggttgaaattaaaacgacaaccccggcccccagaccaccaacgccagcccccaccatcgccagccaacccctgtctctgagaccagaagcctgtaggcctgccgccggtggagctgtgcacacaagaggactggatttcgcctgtgatatctacatttgggccccgctcgcaggcacatgtggagtgctcctcctctccctggtgattaccctgtactgccgcgttaagttctcccgatcagccgacgcgcctgcttacaagcagggccagaaccaactgtacaacgagctgaatctcggtagacgggaagagtacgacgtgttggacaaacggagaggccgcgacccagaaatgggcggcaagcctcgcaggaaaaacccccaggagggactgtacaatgagttgcagaaagataagatggcagaagcttatagcgagatcggaatgaagggggaaaggagacgagggaaaggacacgacggcctttatcagggcctgtccacagcaacaaaagatacgtatgacgccctccatatgcaggcacttccaccacggtgataa

SEQ ID NO: 295 - protein, 445 aa, synthetic construct
  REGION 1..445: note = CAR-T E6 CD3z sequence
MALPVTALLLPLALLLHAARPEVQLVESGGGLVKPGGSLRLSCAASGFTFSRYGMSWVRQAPGKRLEWVSTISGGGTYIYYPDSVKGRFTISRDNAKNTLYLQMNSLRAEDTAVYYCTRDNYGRNYDYGMDYWGQGTLVTVSSGGGGSGGGGSGGGGSEIVLTQSPATLSLSPGERATLTCSATSSVSYIHWYQQRPGQSPRLLIYSTSNLASGIPARFSGSGSGSDYTLTISSLEPEDFAVYYCQQRSSSPFTFGSGTKVEIKTTTPAPRPPTPAPTIASQPLSLRPEACRPAAGGAVHTRGLDFACDIYIWAPLAGTCGVLLLSLVITLYCRVKFSRSADAPAYKQGQNQLYNELNLGRREEYDVLDKRRGRDPEMGGKPRRKNPQEGLYNELQKDKMAEAYSEIGMKGERRRGKGHDGLYQGLSTATKDTYDALHMQALPPR

SEQ ID NO: 296 - DNA, 485 bp, synthetic construct
  misc_feature 1..485: note = CAR-T E6 CD3z gBLOCK sequence
  source 1..485: mol_type = other DNA
tggagctgtgcacacaagaggactggatttcgcctgtgatatctacatttgggccccgctcgcaggcacatgtggagtgctcctcctctccctggtgattaccctgtactgccgcgttaagttctcccgatcagccgacgcgcctgcttacaagcagggccagaaccaactgtacaacgagctgaatctcggtagacgggaagagtacgacgtgttggacaaacggagaggccgcgacccagaaatgggcggcaagcctcgcaggaaaaacccccaggagggactgtacaatgagttgcagaaagataagatggcagaagcttatagcgagatcggaatgaagggggaaaggagacgagggaaaggacacgacggcctttatcagggcctgtccacagcaacaaaagatacgtatgacgccctccatatgcaggcacttccaccacggtgataagtttaaacccgctgatcagcctcgactgtgc

SEQ ID NO: 297 - DNA, 1464 bp, synthetic construct
  misc_feature 1..1464: note = CAR-T E6 CD28/CD3z sequence
  source 1..1464: mol_type = other DNA
atggccctgcccgtgaccgctttgctgctccccctggcgctgctgctgcacgccgccaggccagaggtccagctggttgagagtggcggtgggctggttaagcctggcggctccctgcggctgagctgcgccgcgagtggatttactttcagccgatatgggatgagttgggtgcggcaagctcccgggaagaggctggaatgggtctcaacaatctccggggggggcacttacatctattaccccgactcagtcaaggggagatttaccatttcacgagacaacgctaagaataccctgtatttgcagatgaattctctgagagcagaggacacagctgtttactattgtacccgcgacaactatggcaggaactacgactacggtatggactattggggacaagggacattggttacagtgagcagtggcggcgggggcagcggaggaggaggcagcggtggggggggcagcgagatagtgctcacgcagtcacccgcgactctcagtctctcacctggggaacgagctaccctgacgtgctctgctacctcctcagtgtcatatattcactggtatcagcaacggcccgggcagtcccctagattgctcatttatagtacctctaatctggcctcaggtatccctgcacgattttctggatctggttcaggttctgattacaccctcactatctctagcctggagcctgaagactttgccgtttattactgccagcagaggtctagctccccattcacctttgggagtgggaccaaggttgaaattaaaacgacaaccccggcccccagaccaccaacgccagcccccaccatcgccagccaacccctgtctctgagaccagaagcctgtaggcctgccgccggtggagctgtgcacacaagaggactggatttcgcctgtgatatctacatttgggccccgctcgcaggcacatgtggagtgctcctcctctccctggtgattaccctgtactgcagaagcaagcggtctcggctcctgcattctgattacatgaacatgaccccaagaagaccaggccccaccaggaaacattaccagccctacgctccgccacgcgacttcgctgcctaccggtcccgcgttaagttctcccgatcagccgacgcgcctgcttacaagcagggccagaaccaactgtacaacgagctgaatctcggtagacgggaagagtacgacgtgttggacaaacggagaggccgcgacccagaaatgggcggcaagcctcgcaggaaaaacccccaggagggactgtacaatgagttgcagaaagataagatggcagaagcttatagcgagatcggaatgaagggggaaaggagacgagggaaaggacacgacggcctttatcagggcctgtccacagcaacaaaagatacgtatgacgccctccatatgcaggcacttccaccacggtgataa

SEQ ID NO: 298 - protein, 486 aa, synthetic construct
  REGION 1..486: note = CAR-T E6 CD28/CD3z sequence
MALPVTALLLPLALLLHAARPEVQLVESGGGLVKPGGSLRLSCAASGFTFSRYGMSWVRQAPGKRLEWVSTISGGGTYIYYPDSVKGRFTISRDNAKNTLYLQMNSLRAEDTAVYYCTRDNYGRNYDYGMDYWGQGTLVTVSSGGGGSGGGGSGGGGSEIVLTQSPATLSLSPGERATLTCSATSSVSYIHWYQQRPGQSPRLLIYSTSNLASGIPARFSGSGSGSDYTLTISSLEPEDFAVYYCQQRSSSPFTFGSGTKVEIKTTTPAPRPPTPAPTIASQPLSLRPEACRPAAGGAVHTRGLDFACDIYIWAPLAGTCGVLLLSLVITLYCRSKRSRLLHSDYMNMTPRRPGPTRKHYQPYAPPRDFAAYRSRVKFSRSADAPAYKQGQNQLYNELNLGRREEYDVLDKRRGRDPEMGGKPRRKNPQEGLYNELQKDKMAEAYSEIGMKGERRRGKGHDGLYQGLSTATKDTYDALHMQALPPR

SEQ ID NO: 299 - DNA, 608 bp, synthetic construct
  misc_feature 1..608: note = CAR-T E6 CD28/CD3z g BLOCK sequence
  source 1..608: mol_type = other DNA
tggagctgtgcacacaagaggactggatttcgcctgtgatatctacatttgggccccgctcgcaggcacatgtggagtgctcctcctctccctggtgattaccctgtactgcagaagcaagcggtctcggctcctgcattctgattacatgaacatgaccccaagaagaccaggccccaccaggaaacattaccagccctacgctccgccacgcgacttcgctgcctaccggtcccgcgttaagttctcccgatcagccgacgcgcctgcttacaagcagggccagaaccaactgtacaacgagctgaatctcggtagacgggaagagtacgacgtgttggacaaacggagaggccgcgacccagaaatgggcggcaagcctcgcaggaaaaacccccaggagggactgtacaatgagttgcagaaagataagatggcagaagcttatagcgagatcggaatgaagggggaaaggagacgagggaaaggacacgacggcctttatcagggcctgtccacagcaacaaaagatacgtatgacgccctccatatgcaggcacttccaccacggtgataagtttaaacccgctgatcagcctcgactgtgc

SEQ ID NO: 300 - DNA, 1467 bp, synthetic construct
  misc_feature 1..1467: note = CAR-T E6 4-1BB/CD3z sequence
  source 1..1467: mol_type = other DNA
atggccctgcccgtgaccgctttgctgctccccctggcgctgctgctgcacgccgccaggccagaggtccagctggttgagagtggcggtgggctggttaagcctggcggctccctgcggctgagctgcgccgcgagtggatttactttcagccgatatgggatgagttgggtgcggcaagctcccgggaagaggctggaatgggtctcaacaatctccggggggggcacttacatctattaccccgactcagtcaaggggagatttaccatttcacgagacaacgctaagaataccctgtatttgcagatgaattctctgagagcagaggacacagctgtttactattgtacccgcgacaactatggcaggaactacgactacggtatggactattggggacaagggacattggttacagtgagcagtggcggcgggggcagcggaggaggaggcagcggtggggggggcagcgagatagtgctcacgcagtcacccgcgactctcagtctctcacctggggaacgagctaccctgacgtgctctgctacctcctcagtgtcatatattcactggtatcagcaacggcccgggcagtcccctagattgctcatttatagtacctctaatctggcctcaggtatccctgcacgattttctggatctggttcaggttctgattacaccctcactatctctagcctggagcctgaagactttgccgtttattactgccagcagaggtctagctccccattcacctttgggagtgggaccaaggttgaaattaaaacgacaaccccggcccccagaccaccaacgccagcccccaccatcgccagccaacccctgtctctgagaccagaagcctgtaggcctgccgccggtggagctgtgcacacaagaggactggatttcgcctgtgatatctacatttgggccccgctcgcaggcacatgtggagtgctcctcctctccctggtgattaccctgtactgcaaaaggggccgcaaaaaactcctttacatttttaagcagccttttatgaggccagtacagacgactcaagaggaagacgggtgctcatgccgctttcctgaggaggaggaaggagggtgcgaactgcgcgttaagttctcccgatcagccgacgcgcctgcttacaagcagggccagaaccaactgtacaacgagctgaatctcggtagacgggaagagtacgacgtgttggacaaacggagaggccgcgacccagaaatgggcggcaagcctcgcaggaaaaacccccaggagggactgtacaatgagttgcagaaagataagatggcagaagcttatagcgagatcggaatgaagggggaaaggagacgagggaaaggacacgacggcctttatcagggcctgtccacagcaacaaaagatacgtatgacgccctccatatgcaggcacttccaccacggtgataa

SEQ ID NO: 301 - protein, 487 aa, synthetic construct
  REGION 1..487: note = CAR-T E6 4-1BB/CD3z sequence
MALPVTALLLPLALLLHAARPEVQLVESGGGLVKPGGSLRLSCAASGFTFSRYGMSWVRQAPGKRLEWVSTISGGGTYIYYPDSVKGRFTISRDNAKNTLYLQMNSLRAEDTAVYYCTRDNYGRNYDYGMDYWGQGTLVTVSSGGGGSGGGGSGGGGSEIVLTQSPATLSLSPGERATLTCSATSSVSYIHWYQQRPGQSPRLLIYSTSNLASGIPARFSGSGSGSDYTLTISSLEPEDFAVYYCQQRSSSPFTFGSGTKVEIKTTTPAPRPPTPAPTIASQPLSLRPEACRPAAGGAVHTRGLDFACDIYIWAPLAGTCGVLLLSLVITLYCKRGRKKLLYIFKQPFMRPVQTTQEEDGCSCRFPEEEEGGCELRVKFSRSADAPAYKQGQNQLYNELNLGRREEYDVLDKRRGRDPEMGGKPRRKNPQEGLYNELQKDKMAEAYSEIGMKGERRRGKGHDGLYQGLSTATKDTYDALHMQALPPR

SEQ ID NO: 302 - DNA, 611 bp, synthetic construct
  misc_feature 1..611: note = CAR-T E6 4-1BB/CD3z gBLOCK sequence
  source 1..611: mol_type = other DNA
tggagctgtgcacacaagaggactggatttcgcctgtgatatctacatttgggccccgctcgcaggcacatgtggagtgctcctcctctccctggtgattaccctgtactgcaaaaggggccgcaaaaaactcctttacatttttaagcagccttttatgaggccagtacagacgactcaagaggaagacgggtgctcatgccgctttcctgaggaggaggaaggagggtgcgaactgcgcgttaagttctcccgatcagccgacgcgcctgcttacaagcagggccagaaccaactgtacaacgagctgaatctcggtagacgggaagagtacgacgtgttggacaaacggagaggccgcgacccagaaatgggcggcaagcctcgcaggaaaaacccccaggagggactgtacaatgagttgcagaaagataagatggcagaagcttatagcgagatcggaatgaagggggaaaggagacgagggaaaggacacgacggcctttatcagggcctgtccacagcaacaaaagatacgtatgacgccctccatatgcaggcacttccaccacggtgataagtttaaacccgctgatcagcctcgactgtgc

SEQ ID NO: 303 - DNA, 1590 bp, synthetic construct
  misc_feature 1..1590: note = CAR-T E6 CD28/4-1BB/CD3z sequence
  source 1..1590: mol_type = other DNA
atggccctgcccgtgaccgctttgctgctccccctggcgctgctgctgcacgccgccaggccagaggtccagctggttgagagtggcggtgggctggttaagcctggcggctccctgcggctgagctgcgccgcgagtggatttactttcagccgatatgggatgagttgggtgcggcaagctcccgggaagaggctggaatgggtctcaacaatctccggggggggcacttacatctattaccccgactcagtcaaggggagatttaccatttcacgagacaacgctaagaataccctgtatttgcagatgaattctctgagagcagaggacacagctgtttactattgtacccgcgacaactatggcaggaactacgactacggtatggactattggggacaagggacattggttacagtgagcagtggcggcgggggcagcggaggaggaggcagcggtggggggggcagcgagatagtgctcacgcagtcacccgcgactctcagtctctcacctggggaacgagctaccctgacgtgctctgctacctcctcagtgtcatatattcactggtatcagcaacggcccgggcagtcccctagattgctcatttatagtacctctaatctggcctcaggtatccctgcacgattttctggatctggttcaggttctgattacaccctcactatctctagcctggagcctgaagactttgccgtttattactgccagcagaggtctagctccccattcacctttgggagtgggaccaaggttgaaattaaaacgacaaccccggcccccagaccaccaacgccagcccccaccatcgccagccaacccctgtctctgagaccagaagcctgtaggcctgccgccggtggagctgtgcacacaagaggactggatttcgcctgtgatatctacatttgggccccgctcgcaggcacatgtggagtgctcctcctctccctggtgattaccctgtactgcagaagcaagcggtctcggctcctgcattctgattacatgaacatgaccccaagaagaccaggccccaccaggaaacattaccagccctacgctccgccacgcgacttcgctgcctaccggtccaaaaggggccgcaaaaaactcctttacatttttaagcagccttttatgaggccagtacagacgactcaagaggaagacgggtgctcatgccgctttcctgaggaggaggaaggagggtgcgaactgcgcgttaagttctcccgatcagccgacgcgcctgcttacaagcagggccagaaccaactgtacaacgagctgaatctcggtagacgggaagagtacgacgtgttggacaaacggagaggccgcgacccagaaatgggcggcaagcctcgcaggaaaaacccccaggagggactgtacaatgagttgcagaaagataagatggcagaagcttatagcgagatcggaatgaagggggaaaggagacgagggaaaggacacgacggcctttatcagggcctgtccacagcaacaaaagatacgtatgacgccctccatatgcaggcacttccaccacggtgataa

SEQ ID NO: 304 - protein, 528 aa, synthetic construct
  REGION 1..528: note = CAR-T E6 CD28/4-1BB/CD3z sequence
MALPVTALLLPLALLLHAARPEVQLVESGGGLVKPGGSLRLSCAASGFTFSRYGMSWVRQAPGKRLEWVSTISGGGTYIYYPDSVKGRFTISRDNAKNTLYLQMNSLRAEDTAVYYCTRDNYGRNYDYGMDYWGQGTLVTVSSGGGGSGGGGSGGGGSEIVLTQSPATLSLSPGERATLTCSATSSVSYIHWYQQRPGQSPRLLIYSTSNLASGIPARFSGSGSGSDYTLTISSLEPEDFAVYYCQQRSSSPFTFGSGTKVEIKTTTPAPRPPTPAPTIASQPLSLRPEACRPAAGGAVHTRGLDFACDIYIWAPLAGTCGVLLLSLVITLYCRSKRSRLLHSDYMNMTPRRPGPTRKHYQPYAPPRDFAAYRSKRGRKKLLYIFKQPFMRPVQTTQEEDGCSCRFPEEEEGGCELRVKFSRSADAPAYKQGQNQLYNELNLGRREEYDVLDKRRGRDPEMGGKPRRKNPQEGLYNELQKDKMAEAYSEIGMKGERRRGKGHDGLYQGLSTATKDTYDALHMQALPPR

SEQ ID NO: 305 - DNA, 1668 bp, synthetic construct
  misc_feature 1..1668: note = CAR-T E6 CD28/4-1BB/CD3z gBLOCK sequence
  source 1..1668: mol_type = other DNA
atagggagacccaagctggctagttaagcttggtaccgagggccaccatggccctgcccgtgaccgctttgctgctccccctggcgctgctgctgcacgccgccaggccagaggtccagctggttgagagtggcggtgggctggttaagcctggcggctccctgcggctgagctgcgccgcgagtggatttactttcagccgatatgggatgagttgggtgcggcaagctcccgggaagaggctggaatgggtctcaacaatctccggggggggcacttacatctattaccccgactcagtcaaggggagatttaccatttcacgagacaacgctaagaataccctgtatttgcagatgaattctctgagagcagaggacacagctgtttactattgtacccgcgacaactatggcaggaactacgactacggtatggactattggggacaagggacattggttacagtgagcagtggcggcgggggcagcggaggaggaggcagcggtggggggggcagcgagatagtgctcacgcagtcacccgcgactctcagtctctcacctggggaacgagctaccctgacgtgctctgctacctcctcagtgtcatatattcactggtatcagcaacggcccgggcagtcccctagattgctcatttatagtacctctaatctggcctcaggtatccctgcacgattttctggatctggttcaggttctgattacaccctcactatctctagcctggagcctgaagactttgccgtttattactgccagcagaggtctagctccccattcacctttgggagtgggaccaaggttgaaattaaaacgacaaccccggcccccagaccaccaacgccagcccccaccatcgccagccaacccctgtctctgagaccagaagcctgtaggcctgccgccggtggagctgtgcacacaagaggactggatttcgcctgtgatatctacatttgggccccgctcgcaggcacatgtggagtgctcctcctctccctggtgattaccctgtactgcagaagcaagcggtctcggctcctgcattctgattacatgaacatgaccccaagaagaccaggccccaccaggaaacattaccagccctacgctccgccacgcgacttcgctgcctaccggtccaaaaggggccgcaaaaaactcctttacatttttaagcagccttttatgaggccagtacagacgactcaagaggaagacgggtgctcatgccgctttcctgaggaggaggaaggagggtgcgaactgcgcgttaagttctcccgatcagccgacgcgcctgcttacaagcagggccagaaccaactgtacaacgagctgaatctcggtagacgggaagagtacgacgtgttggacaaacggagaggccgcgacccagaaatgggcggcaagcctcgcaggaaaaacccccaggagggactgtacaatgagttgcagaaagataagatggcagaagcttatagcgagatcggaatgaagggggaaaggagacgagggaaaggacacgacggcctttatcagggcctgtccacagcaacaaaagatacgtatgacgccctccatatgcaggcacttccaccacggtgataagtttaaacccgctgatcagcctcgactgtgc

SEQ ID NO: 306 - DNA, 1608 bp, synthetic construct
  misc_feature 1..1608: note = CAR-T C2 CD28/4-1BB/CD3z sequence
  source 1..1608: mol_type = other DNA
atggccttgccagtgacggccctgctgctgccattggctcttctgttgcacgctgccaggcctgaagtgcagctcgtagagagtggcgggggactggtgaagcccggtggaagcctcagactcagttgcgccgcctcaggtttcactttttcaggttacgccatgtcctgggtaagacaggcaccggggaaaggactcgagtgggtgtctactatcagctcaggaggcacttatatatattatcctgactctgtaaaaggccgatttacgatttctcgcgacaatgcaaagaactccctctacctccaaatgaacagtcttagggcagaagacactgctgtatactattgtgcacgcctcggcggcgacaactactacgagtactttgacgtgtgggggaaagggactaccgtgacagtttcaagcggaggaggtggctcaggtggaggcgggtcaggggggggaggaagtgatattgtgctcacacaatccccagcctccctggctgtgtctcccggccaacgcgctacaattacatgtcgggcctccaaaagcgtgagcaccagcggctacagctacatgcactggtatcaacagaaaccaggacaaccccccaaactgttgatttatctcgcttcaaacttggagtccggcgtgcctgcgcgcttttcagggagtgggagcggcacagattttacgctgactatcaaccccgtagaagcaaacgatacagcgaattattattgtcaacattcccgggaactcccctttacgttcggcgggggcacaaaggtcgaaattaagagaaccacgacaaccccggcccccagaccaccaacgccagcccccaccatcgccagccaacccctgtctctgagaccagaagcctgtaggcctgccgccggtggagctgtgcacacaagaggactggatttcgcctgtgatatctacatttgggccccgctcgcaggcacatgtggagtgctcctcctctccctggtgattaccctgtactgcagaagcaagcggtctcggctcctgcattctgattacatgaacatgaccccaagaagaccaggccccaccaggaaacattaccagccctacgctccgccacgcgacttcgctgcctaccggtccaaaaggggccgcaaaaaactcctttacatttttaagcagccttttatgaggccagtacagacgactcaagaggaagacgggtgctcatgccgctttcctgaggaggaggaaggagggtgcgaactgcgcgttaagttctcccgatcagccgacgcgcctgcttacaagcagggccagaaccaactgtacaacgagctgaatctcggtagacgggaagagtacgacgtgttggacaaacggagaggccgcgacccagaaatgggcggcaagcctcgcaggaaaaacccccaggagggactgtacaatgagttgcagaaagataagatggcagaagcttatagcgagatcggaatgaagggggaaaggagacgagggaaaggacacgacggcctttatcagggcctgtccacagcaacaaaagatacgtatgacgccctccatatgcaggcacttccaccacggtgataa

SEQ ID NO: 307 - protein, 513 aa, synthetic construct
  REGION 1..513: note = CAR-T C2 CD28/4-1BB/CD3z sequence
EVQLVESGGGLVKPGGSLRLSCAASGFTFSGYAMSWVRQAPGKGLEWVSTISSGGTYIYYPDSVKGRFTISRDNAKNSLYLQMNSLRAEDTAVYYCARLGGDNYYEYFDVWGKGTTVTVSSGGGGSGGGGSGGGGSDIVLTQSPASLAVSPGQRATITCRASKSVSTSGYSYMHWYQQKPGQPPKLLIYLASNLESGVPARFSGSGSGTDFTLTINPVEANDTANYYCQHSRELPFTFGGGTKVEIKRTTTTPAPRPPTPAPTIASQPLSLRPEACRPAAGGAVHTRGLDFACDIYIWAPLAGTCGVLLLSLVITLYCRSKRSRLLHSDYMNMTPRRPGPTRKHYQPYAPPRDFAAYRSKRGRKKLLYIFKQPFMRPVQTTQEEDGCSCRFPEEEEGGCELRVKFSRSADAPAYKQGQNQLYNELNLGRREEYDVLDKRRGRDPEMGGKPRRKNPQEGLYNELQKDKMAEAYSEIGMKGERRRGKGHDGLYQGLSTATKDTYDALHMQALPPR

SEQ ID NO: 308 - DNA, 553 bp, synthetic construct
  misc_feature 1..553: note = CAR-T C2-1 gBLOCK sequence
  source 1..553: mol_type = other DNA
atagggagacccaagctggctagttaagcttggtaccgagggccaccatggccttgccagtgacggccctgctgctgccattggctcttctgttgcacgctgccaggcctgaagtgcagctcgtagagagtggcgggggactggtgaagcccggtggaagcctcagactcagttgcgccgcctcaggtttcactttttcaggttacgccatgtcctgggtaagacaggcaccggggaaaggactcgagtgggtgtctactatcagctcaggaggcacttatatatattatcctgactctgtaaaaggccgatttacgatttctcgcgacaatgcaaagaactccctctacctccaaatgaacagtcttagggcagaagacactgctgtatactattgtgcacgcctcggcggcgacaactactacgagtactttgacgtgtgggggaaagggactaccgtgacagtttcaagcggaggaggtggctcaggtggaggcgggtcaggggggggaggaagtgatattgtgctcacacaatccccagcctccctggc

SEQ ID NO: 309 - DNA, 518 bp, synthetic construct
  misc_feature 1..518: note = CAR-T C2-2 gBLOCK sequence
  source 1..518: mol_type = other DNA
aagtgatattgtgctcacacaatccccagcctccctggctgtgtctcccggccaacgcgctacaattacatgtcgggcctccaaaagcgtgagcaccagcggctacagctacatgcactggtatcaacagaaaccaggacaaccccccaaactgttgatttatctcgcttcaaacttggagtccggcgtgcctgcgcgcttttcagggagtgggagcggcacagattttacgctgactatcaaccccgtagaagcaaacgatacagcgaattattattgtcaacattcccgggaactcccctttacgttcggcgggggcacaaaggtcgaaattaagagaaccacgacaaccccggcccccagaccaccaacgccagcccccaccatcgccagccaacccctgtctctgagaccagaagcctgtaggcctgccgccggtggagctgtgcacacaagaggactggatttcgcctgtgatatctacatttgggccccgctcgcaggcacatgtggagtgc

SEQ ID NO: 310 - DNA, 2028 bp, synthetic construct
  misc_feature 1..2028: note = CAR E6 Fc/8/4-1BB/CD3z sequence
  source 1..2028: mol_type = other DNA
atggccctgcccgtgaccgctttgctgctccccctggcgctgctgctgcacgccgccaggccagaggtccagctggttgagagtggcggtgggctggttaagcctggcggctccctgcggctgagctgcgccgcgagtggatttactttcagccgatatgggatgagttgggtgcggcaagctcccgggaagaggctggaatgggtctcaacaatctccggggggggcacttacatctattaccccgactcagtcaaggggagatttaccatttcacgagacaacgctaagaataccctgtatttgcagatgaattctctgagagcagaggacacagctgtttactattgtacccgcgacaactatggcaggaactacgactacggtatggactattggggacaagggacattggttacagtgagcagtggcggcgggggcagcggaggaggaggcagcggtggcggaggcagcgagatagtgctcacgcagtcacccgcgactctcagtctctcacctggggaacgagctaccctgacgtgctctgctacctcctcagtgtcatatattcactggtatcagcaacggcccgggcagtcccctagattgctcatttatagtacctctaatctggcctcaggtatccctgcacgattttctggatctggttcaggttctgattacaccctcactatctctagcctggagcctgaagactttgccgtttattactgccagcagaggtctagctccccattcacctttgggagtgggaccaaggttgaaattaaagagcccaaatcttgtgacaaaactcacacatgcccaccgtgcccagcacctgaactcctggggggaccgtcagtcttcctcttccccccaaaacccaaggacaccctcatgatctcccggacccctgaggtcacatgcgtggtggtggacgtgagccacgaagaccctgaggtcaagttcaactggtacgtggacggcgtggaggtgcataatgccaagacaaagccgcgggaggagcagtacaacagcacgtaccgtgtggtcagcgtcctcaccgtcctgcaccaggactggctgaatggcaaggagtacaagtgcaaggtctccaacaaagccctcccagcccccatcgagaaaaccatctccaaagccaaagggcagccccgagaaccacaggtgtacaccctgcccccatcccgggaggagatgaccaagaaccaggtcagcctgacctgcctggtcaaaggcttctatcccagcgacatcgccgtggagtgggagagcaatgggcagccggagaacaactacaagaccacgcctcccgtgctggactccgacggctccttcttcctctacagcaagctcaccgtggacaagagcaggtggcagcaggggaacgtcttctcatgctccgtgatgcatgaggctctgcacaaccactacacgcagaagagcctctccctgtctccgggtaaaatctacatttgggccccgctcgcaggcacatgtggagtgctcctcctctccctggtgattaccctgtactgcaaaaggggccgcaaaaaactcctttacatttttaagcagccttttatgaggccagtacagacgactcaagaggaagacgggtgctcatgccgctttcctgaggaggaggaaggagggtgcgaactgcgcgttaagttctcccgatcagccgacgcgcctgcttacaagcagggccagaaccaactgtacaacgagctgaatctcggtagacgggaagagtacgacgtgttggacaaacggagaggccgcgacccagaaatgggcggcaagcctcgcaggaaaaacccccaggagggactgtacaatgagttgcagaaagataagatggcagaagcttatagcgagatcggaatgaagggggaaaggagacgagggaaaggacacgacggcctttatcagggcctgtccacagcaacaaaagatacgtatgacgccctccatatgcaggcacttccaccacggtgataa

SEQ ID NO: 311 - protein, 674 aa, synthetic construct
  REGION 1..674: note = CAR E6 Fc/8/4-1BB/CD3z sequence
MALPVTALLLPLALLLHAARPEVQLVESGGGLVKPGGSLRLSCAASGFTFSRYGMSWVRQAPGKRLEWVSTISGGGTYIYYPDSVKGRFTISRDNAKNTLYLQMNSLRAEDTAVYYCTRDNYGRNYDYGMDYWGQGTLVTVSSGGGGSGGGGSGGGGSEIVLTQSPATLSLSPGERATLTCSATSSVSYIHWYQQRPGQSPRLLIYSTSNLASGIPARFSGSGSGSDYTLTISSLEPEDFAVYYCQQRSSSPFTFGSGTKVEIKEPKSCDKTHTCPPCPAPELLGGPSVFLFPPKPKDTLMISRTPEVTCVVVDVSHEDPEVKFNWYVDGVEVHNAKTKPREEQYNSTYRVVSVLTVLHQDWLNGKEYKCKVSNKALPAPIEKTISKAKGQPREPQVYTLPPSREEMTKNQVSLTCLVKGFYPSDIAVEWESNGQPENNYKTTPPVLDSDGSFFLYSKLTVDKSRWQQGNVFSCSVMHEALHNHYTQKSLSLSPGKIYIWAPLAGTCGVLLLSLVITLYCKRGRKKLLYIFKQPFMRPVQTTQEEDGCSCRFPEEEEGGCELRVKFSRSADAPAYKQGQNQLYNELNLGRREEYDVLDKRRGRDPEMGGKPRRKNPQEGLYNELQKDKMAEAYSEIGMKGERRRGKGHDGLYQGLSTATKDTYDALHMQALPPR

SEQ ID NO: 312 - DNA, 714 bp, synthetic construct
  misc_feature 1..714: note = E6 CAR pCDH gBLOCK sequence
  source 1..714: mol_type = other DNA
acgctgttttgacctccatagaagattctagagctagctgtagagcttggtaccgagggccaccatggccctgcccgtgaccgctttgctgctccccctggcgctgctgctgcacgccgccaggccagaggtccagctggttgagagtggcggtgggctggttaagcctggcggctccctgcggctgagctgcgccgcgagtggatttactttcagccgatatgggatgagttgggtgcggcaagctcccgggaagaggctggaatgggtctcaacaatctccggggggggcacttacatctattaccccgactcagtcaaggggagatttaccatttcacgagacaacgctaagaataccctgtatttgcagatgaattctctgagagcagaggacacagctgtttactattgtacccgcgacaactatggcaggaactacgactacggtatggactattggggacaagggacattggttacagtgagcagtggcggcgggggcagcggaggaggaggcagcggtggcggaggcagcgagatagtgctcacgcagtcacccgcgactctcagtctctcacctggggaacgagctaccctgacgtgctctgctacctcctcagtgtcatatattcactggtatcagcaacggcccgggcagtcccctagattgctcatttatagtacctctaatctggcctcaggtatccctgc

SEQ ID NO: 313 - DNA, 723 bp, synthetic construct
  misc_feature 1..723: note = E6 CAR Fc pCDH gBLOCK sequence
  source 1..723: mol_type = other DNA
agtacctctaatctggcctcaggtatccctgcacgattttctggatctggttcaggttctgattacaccctcactatctctagcctggagcctgaagactttgccgtttattactgccagcagaggtctagctccccattcacctttgggagtgggaccaaggttgaaattaaagagcccaaatcttgtgacaaaactcacacatgcccaccgtgcccagcacctgaactcctggggggaccgtcagtcttcctcttccccccaaaacccaaggacaccctcatgatctcccggacccctgaggtcacatgcgtggtggtggacgtgagccacgaagaccctgaggtcaagttcaactggtacgtggacggcgtggaggtgcataatgccaagacaaagccgcgggaggagcagtacaacagcacgtaccgtgtggtcagcgtcctcaccgtcctgcaccaggactggctgaatggcaaggagtacaagtgcaaggtctccaacaaagccctcccagcccccatcgagaaaaccatctccaaagccaaagggcagccccgagaaccacaggtgtacaccctgcccccatcccgggaggagatgaccaagaaccaggtcagcctgacctgcctggtcaaaggcttctatcccagcgacatcgccgtggagtgggagagcaatgggcagccggagaacaactacaagaccacgcctcccgtgctg

SEQ ID NO: 314 - DNA, 778 bp, synthetic construct
  misc_feature 1..778: note = E6 CAR 8BB3 pCDH gBLOCK sequence
  source 1..778: mol_type = other DNA
agaacaactacaagaccacgcctcccgtgctggactccgacggctccttcttcctctacagcaagctcaccgtggacaagagcaggtggcagcaggggaacgtcttctcatgctccgtgatgcatgaggctctgcacaaccactacacgcagaagagcctctccctgtctccgggtaaaatctacatttgggccccgctcgcaggcacatgtggagtgctcctcctctccctggtgattaccctgtactgcaaaaggggccgcaaaaaactcctttacatttttaagcagccttttatgaggccagtacagacgactcaagaggaagacgggtgctcatgccgctttcctgaggaggaggaaggagggtgcgaactgcgcgttaagttctcccgatcagccgacgcgcctgcttacaagcagggccagaaccaactgtacaacgagctgaatctcggtagacgggaagagtacgacgtgttggacaaacggagaggccgcgacccagaaatgggcggcaagcctcgcaggaaaaacccccaggagggactgtacaatgagttgcagaaagataagatggcagaagcttatagcgagatcggaatgaagggggaaaggagacgagggaaaggacacgacggcctttatcagggcctgtccacagcaacaaaagatacgtatgacgccctccatatgcaggcacttccaccacggtgataagtttaaacccgctgatcaggcggccgcgaaggatctgcgatcgctccggtgcccgtcag

SEQ ID NO: 315 - DNA, 1983 bp, synthetic construct
  misc_feature 1..1983: note = CAR E6 FcH/8/4-1BB/CD3z sequence
  source 1..1983: mol_type = other DNA
atggccctgcccgtgaccgctttgctgctccccctggcgctgctgctgcacgccgccaggccagaggtccagctggttgagagtggcggtgggctggttaagcctggcggctccctgcggctgagctgcgccgcgagtggatttactttcagccgatatgggatgagttgggtgcggcaagctcccgggaagaggctggaatgggtctcaacaatctccggggggggcacttacatctattaccccgactcagtcaaggggagatttaccatttcacgagacaacgctaagaataccctgtatttgcagatgaattctctgagagcagaggacacagctgtttactattgtacccgcgacaactatggcaggaactacgactacggtatggactattggggacaagggacattggttacagtgagcagtggcggcgggggcagcggaggaggaggcagcggtggcggaggcagcgagatagtgctcacgcagtcacccgcgactctcagtctctcacctggggaacgagctaccctgacgtgctctgctacctcctcagtgtcatatattcactggtatcagcaacggcccgggcagtcccctagattgctcatttatagtacctctaatctggcctcaggtatccctgcacgattttctggatctggttcaggttctgattacaccctcactatctctagcctggagcctgaagactttgccgtttattactgccagcagaggtctagctccccattcacctttgggagtgggaccaaggttgaaattaaagcacctgaactcctggggggaccgtcagtcttcctcttccccccaaaacccaaggacaccctcatgatctcccggacccctgaggtcacatgcgtggtggtggacgtgagccacgaagaccctgaggtcaagttcaactggtacgtggacggcgtggaggtgcataatgccaagacaaagccgcgggaggagcagtacaacagcacgtaccgtgtggtcagcgtcctcaccgtcctgcaccaggactggctgaatggcaaggagtacaagtgcaaggtctccaacaaagccctcccagcccccatcgagaaaaccatctccaaagccaaagggcagccccgagaaccacaggtgtacaccctgcccccatcccgggaggagatgaccaagaaccaggtcagcctgacctgcctggtcaaaggcttctatcccagcgacatcgccgtggagtgggagagcaatgggcagccggagaacaactacaagaccacgcctcccgtgctggactccgacggctccttcttcctctacagcaagctcaccgtggacaagagcaggtggcagcaggggaacgtcttctcatgctccgtgatgcatgaggctctgcacaaccactacacgcagaagagcctctccctgtctccgggtaaaatctacatttgggccccgctcgcaggcacatgtggagtgctcctcctctccctggtgattaccctgtactgcaaaaggggccgcaaaaaactcctttacatttttaagcagccttttatgaggccagtacagacgactcaagaggaagacgggtgctcatgccgctttcctgaggaggaggaaggagggtgcgaactgcgcgttaagttctcccgatcagccgacgcgcctgcttacaagcagggccagaaccaactgtacaacgagctgaatctcggtagacgggaagagtacgacgtgttggacaaacggagaggccgcgacccagaaatgggcggcaagcctcgcaggaaaaacccccaggagggactgtacaatgagttgcagaaagataagatggcagaagcttatagcgagatcggaatgaagggggaaaggagacgagggaaaggacacgacggcctttatcagggcctgtccacagcaacaaaagatacgtatgacgccctccatatgcaggcacttccaccacggtgataa

SEQ ID NO: 316 - protein, 659 aa, synthetic construct
  REGION 1..659: note = CAR E6 FcH/8/4-1BB/CD3z sequence
MALPVTALLLPLALLLHAARPEVQLVESGGGLVKPGGSLRLSCAASGFTFSRYGMSWVRQAPGKRLEWVSTISGGGTYIYYPDSVKGRFTISRDNAKNTLYLQMNSLRAEDTAVYYCTRDNYGRNYDYGMDYWGQGTLVTVSSGGGGSGGGGSGGGGSEIVLTQSPATLSLSPGERATLTCSATSSVSYIHWYQQRPGQSPRLLIYSTSNLASGIPARFSGSGSGSDYTLTISSLEPEDFAVYYCQQRSSSPFTFGSGTKVEIKAPELLGGPSVFLFPPKPKDTLMISRTPEVTCVVVDVSHEDPEVKFNWYVDGVEVHNAKTKPREEQYNSTYRVVSVLTVLHQDWLNGKEYKCKVSNKALPAPIEKTISKAKGQPREPQVYTLPPSREEMTKNQVSLTCLVKGFYPSDIAVEWESNGQPENNYKTTPPVLDSDGSFFLYSKLTVDKSRWQQGNVFSCSVMHEALHNHYTQKSLSLSPGKIYIWAPLAGTCGVLLLSLVITLYCKRGRKKLLYIFKQPFMRPVQTTQEEDGCSCRFPEEEEGGCELRVKFSRSADAPAYKQGQNQLYNELNLGRREEYDVLDKRRGRDPEMGGKPRRKNPQEGLYNELQKDKMAEAYSEIGMKGERRRGKGHDGLYQGLSTATKDTYDALHMQALPPR

SEQ ID NO: 317 - DNA, 678 bp, synthetic construct
  misc_feature 1..678: note = E6 CAR FcH pCDH gBLOCK sequence
  source 1..678: mol_type = other DNA
agtacctctaatctggcctcaggtatccctgcacgattttctggatctggttcaggttctgattacaccctcactatctctagcctggagcctgaagactttgccgtttattactgccagcagaggtctagctccccattcacctttgggagtgggaccaaggttgaaattaaagcacctgaactcctggggggaccgtcagtcttcctcttccccccaaaacccaaggacaccctcatgatctcccggacccctgaggtcacatgcgtggtggtggacgtgagccacgaagaccctgaggtcaagttcaactggtacgtggacggcgtggaggtgcataatgccaagacaaagccgcgggaggagcagtacaacagcacgtaccgtgtggtcagcgtcctcaccgtcctgcaccaggactggctgaatggcaaggagtacaagtgcaaggtctccaacaaagccctcccagcccccatcgagaaaaccatctccaaagccaaagggcagccccgagaaccacaggtgtacaccctgcccccatcccgggaggagatgaccaagaaccaggtcagcctgacctgcctggtcaaaggcttctatcccagcgacatcgccgtggagtgggagagcaatgggcagccggagaacaactacaagaccacgcctcccgtgctg

SEQ ID NO: 318 - DNA, 2022 bp, synthetic construct
  misc_feature 1..2022: note = CAR E6 Fc/4/4-1BB/CD3z sequence
  source 1..2022: mol_type = other DNA
atggccctgcccgtgaccgctttgctgctccccctggcgctgctgctgcacgccgccaggccagaggtccagctggttgagagtggcggtgggctggttaagcctggcggctccctgcggctgagctgcgccgcgagtggatttactttcagccgatatgggatgagttgggtgcggcaagctcccgggaagaggctggaatgggtctcaacaatctccggggggggcacttacatctattaccccgactcagtcaaggggagatttaccatttcacgagacaacgctaagaataccctgtatttgcagatgaattctctgagagcagaggacacagctgtttactattgtacccgcgacaactatggcaggaactacgactacggtatggactattggggacaagggacattggttacagtgagcagtggcggcgggggcagcggaggaggaggcagcggtggcggaggcagcgagatagtgctcacgcagtcacccgcgactctcagtctctcacctggggaacgagctaccctgacgtgctctgctacctcctcagtgtcatatattcactggtatcagcaacggcccgggcagtcccctagattgctcatttatagtacctctaatctggcctcaggtatccctgcacgattttctggatctggttcaggttctgattacaccctcactatctctagcctggagcctgaagactttgccgtttattactgccagcagaggtctagctccccattcacctttgggagtgggaccaaggttgaaattaaagagcccaaatcttgtgacaaaactcacacatgcccaccgtgcccagcacctgaactcctggggggaccgtcagtcttcctcttccccccaaaacccaaggacaccctcatgatctcccggacccctgaggtcacatgcgtggtggtggacgtgagccacgaagaccctgaggtcaagttcaactggtacgtggacggcgtggaggtgcataatgccaagacaaagccgcgggaggagcagtacaacagcacgtaccgtgtggtcagcgtcctcaccgtcctgcaccaggactggctgaatggcaaggagtacaagtgcaaggtctccaacaaagccctcccagcccccatcgagaaaaccatctccaaagccaaagggcagccccgagaaccacaggtgtacaccctgcccccatcccgggaggagatgaccaagaaccaggtcagcctgacctgcctggtcaaaggcttctatcccagcgacatcgccgtggagtgggagagcaatgggcagccggagaacaactacaagaccacgcctcccgtgctggactccgacggctccttcttcctctacagcaagctcaccgtggacaagagcaggtggcagcaggggaacgtcttctcatgctccgtgatgcatgaggctctgcacaaccactacacgcagaagagcctctccctgtctccgggtaaaatggccctgattgtgctggggggcgtcgccggcctcctgcttttcattgggctaggcatcttcttcaaaaggggccgcaaaaaactcctttacatttttaagcagccttttatgaggccagtacagacgactcaagaggaagacgggtgctcatgccgctttcctgaggaggaggaaggagggtgcgaactgcgcgttaagttctcccgatcagccgacgcgcctgcttacaagcagggccagaaccaactgtacaacgagctgaatctcggtagacgggaagagtacgacgtgttggacaaacggagaggccgcgacccagaaatgggcggcaagcctcgcaggaaaaacccccaggagggactgtacaatgagttgcagaaagataagatggcagaagcttatagcgagatcggaatgaagggggaaaggagacgagggaaaggacacgacggcctttatcagggcctgtccacagcaacaaaagatacgtatgacgccctccatatgcaggcacttccaccacggtgataa

SEQ ID NO: 319 - protein, 672 aa, synthetic construct
  REGION 1..672: note = CAR E6 Fc/4/4-1BB/CD3z sequence
MALPVTALLLPLALLLHAARPEVQLVESGGGLVKPGGSLRLSCAASGFTFSRYGMSWVRQAPGKRLEWVSTISGGGTYIYYPDSVKGRFTISRDNAKNTLYLQMNSLRAEDTAVYYCTRDNYGRNYDYGMDYWGQGTLVTVSSGGGGSGGGGSGGGGSEIVLTQSPATLSLSPGERATLTCSATSSVSYIHWYQQRPGQSPRLLIYSTSNLASGIPARFSGSGSGSDYTLTISSLEPEDFAVYYCQQRSSSPFTFGSGTKVEIKEPKSCDKTHTCPPCPAPELLGGPSVFLFPPKPKDTLMISRTPEVTCVVVDVSHEDPEVKFNWYVDGVEVHNAKTKPREEQYNSTYRVVSVLTVLHQDWLNGKEYKCKVSNKALPAPIEKTISKAKGQPREPQVYTLPPSREEMTKNQVSLTCLVKGFYPSDIAVEWESNGQPENNYKTTPPVLDSDGSFFLYSKLTVDKSRWQQGNVFSCSVMHEALHNHYTQKSLSLSPGKMALIVLGGVAGLLLFIGLGIFFKRGRKKLLYIFKQPFMRPVQTTQEEDGCSCRFPEEEEGGCELRVKFSRSADAPAYKQGQNQLYNELNLGRREEYDVLDKRRGRDPEMGGKPRRKNPQEGLYNELQKDKMAEAYSEIGMKGERRRGKGHDGLYQGLSTATKDTYDALHMQALPPR

SEQ ID NO: 320 - DNA, 772 bp, synthetic construct
  misc_feature 1..772: note = E6 CAR 44BB3 pCDH gBLOCK sequence
  source 1..772: mol_type = other DNA
agaacaactacaagaccacgcctcccgtgctggactccgacggctccttcttcctctacagcaagctcaccgtggacaagagcaggtggcagcaggggaacgtcttctcatgctccgtgatgcatgaggctctgcacaaccactacacgcagaagagcctctccctgtctccgggtaaaatggccctgattgtgctggggggcgtcgccggcctcctgcttttcattgggctaggcatcttcttcaaaaggggccgcaaaaaactcctttacatttttaagcagccttttatgaggccagtacagacgactcaagaggaagacgggtgctcatgccgctttcctgaggaggaggaaggagggtgcgaactgcgcgttaagttctcccgatcagccgacgcgcctgcttacaagcagggccagaaccaactgtacaacgagctgaatctcggtagacgggaagagtacgacgtgttggacaaacggagaggccgcgacccagaaatgggcggcaagcctcgcaggaaaaacccccaggagggactgtacaatgagttgcagaaagataagatggcagaagcttatagcgagatcggaatgaagggggaaaggagacgagggaaaggacacgacggcctttatcagggcctgtccacagcaacaaaagatacgtatgacgccctccatatgcaggcacttccaccacggtgataagtttaaacccgctgatcaggcggccgcgaaggatctgcgatcgctccggtgcccgtcag

SEQ ID NO: 321 - DNA, 1977 bp, synthetic construct
  misc_feature 1..1977: note = CAR E6 FcH/4/4-1BB/CD3z sequence
  source 1..1977: mol_type = other DNA
atggccctgcccgtgaccgctttgctgctccccctggcgctgctgctgcacgccgccaggccagaggtccagctggttgagagtggcggtgggctggttaagcctggcggctccctgcggctgagctgcgccgcgagtggatttactttcagccgatatgggatgagttgggtgcggcaagctcccgggaagaggctggaatgggtctcaacaatctccggggggggcacttacatctattaccccgactcagtcaaggggagatttaccatttcacgagacaacgctaagaataccctgtatttgcagatgaattctctgagagcagaggacacagctgtttactattgtacccgcgacaactatggcaggaactacgactacggtatggactattggggacaagggacattggttacagtgagcagtggcggcgggggcagcggaggaggaggcagcggtggcggaggcagcgagatagtgctcacgcagtcacccgcgactctcagtctctcacctggggaacgagctaccctgacgtgctctgctacctcctcagtgtcatatattcactggtatcagcaacggcccgggcagtcccctagattgctcatttatagtacctctaatctggcctcaggtatccctgcacgattttctggatctggttcaggttctgattacaccctcactatctctagcctggagcctgaagactttgccgtttattactgccagcagaggtctagctccccattcacctttgggagtgggaccaaggttgaaattaaagcacctgaactcctggggggaccgtcagtcttcctcttccccccaaaacccaaggacaccctcatgatctcccggacccctgaggtcacatgcgtggtggtggacgtgagccacgaagaccctgaggtcaagttcaactggtacgtggacggcgtggaggtgcataatgccaagacaaagccgcgggaggagcagtacaacagcacgtaccgtgtggtcagcgtcctcaccgtcctgcaccaggactggctgaatggcaaggagtacaagtgcaaggtctccaacaaagccctcccagcccccatcgagaaaaccatctccaaagccaaagggcagccccgagaaccacaggtgtacaccctgcccccatcccgggaggagatgaccaagaaccaggtcagcctgacctgcctggtcaaaggcttctatcccagcgacatcgccgtggagtgggagagcaatgggcagccggagaacaactacaagaccacgcctcccgtgctggactccgacggctccttcttcctctacagcaagctcaccgtggacaagagcaggtggcagcaggggaacgtcttctcatgctccgtgatgcatgaggctctgcacaaccactacacgcagaagagcctctccctgtctccgggtaaaatggccctgattgtgctggggggcgtcgccggcctcctgcttttcattgggctaggcatcttcttcaaaaggggccgcaaaaaactcctttacatttttaagcagccttttatgaggccagtacagacgactcaagaggaagacgggtgctcatgccgctttcctgaggaggaggaaggagggtgcgaactgcgcgttaagttctcccgatcagccgacgcgcctgcttacaagcagggccagaaccaactgtacaacgagctgaatctcggtagacgggaagagtacgacgtgttggacaaacggagaggccgcgacccagaaatgggcggcaagcctcgcaggaaaaacccccaggagggactgtacaatgagttgcagaaagataagatggcagaagcttatagcgagatcggaatgaagggggaaaggagacgagggaaaggacacgacggcctttatcagggcctgtccacagcaacaaaagatacgtatgacgccctccatatgcaggcacttccaccacggtgataa

SEQ ID NO: 322 - protein, 657 aa, synthetic construct
  REGION 1..657: note = CAR E6 FcH/4/4-1BB/CD3z sequence
MALPVTALLLPLALLLHAARPEVQLVESGGGLVKPGGSLRLSCAASGFTFSRYGMSWVRQAPGKRLEWVSTISGGGTYIYYPDSVKGRFTISRDNAKNTLYLQMNSLRAEDTAVYYCTRDNYGRNYDYGMDYWGQGTLVTVSSGGGGSGGGGSGGGGSEIVLTQSPATLSLSPGERATLTCSATSSVSYIHWYQQRPGQSPRLLIYSTSNLASGIPARFSGSGSGSDYTLTISSLEPEDFAVYYCQQRSSSPFTFGSGTKVEIKAPELLGGPSVFLFPPKPKDTLMISRTPEVTCVVVDVSHEDPEVKFNWYVDGVEVHNAKTKPREEQYNSTYRVVSVLTVLHQDWLNGKEYKCKVSNKALPAPIEKTISKAKGQPREPQVYTLPPSREEMTKNQVSLTCLVKGFYPSDIAVEWESNGQPENNYKTTPPVLDSDGSFFLYSKLTVDKSRWQQGNVFSCSVMHEALHNHYTQKSLSLSPGKMALIVLGGVAGLLLFIGLGIFFKRGRKKLLYIFKQPFMRPVQTTQEEDGCSCRFPEEEEGGCELRVKFSRSADAPAYKQGQNQLYNELNLGRREEYDVLDKRRGRDPEMGGKPRRKNPQEGLYNELQKDKMAEAYSEIGMKGERRRGKGHDGLYQGLSTATKDTYDALHMQALPPR

SEQ ID NO: 323 - DNA, 1506 bp, synthetic construct
  misc_feature 1..1506: note = CAR E6 IgD/8/4-1BB/CD3z sequence
  source 1..1506: mol_type = other DNA
atggccctgcccgtgaccgctttgctgctccccctggcgctgctgctgcacgccgccaggccagaggtccagctggttgagagtggcggtgggctggttaagcctggcggctccctgcggctgagctgcgccgcgagtggatttactttcagccgatatgggatgagttgggtgcggcaagctcccgggaagaggctggaatgggtctcaacaatctccggggggggcacttacatctattaccccgactcagtcaaggggagatttaccatttcacgagacaacgctaagaataccctgtatttgcagatgaattctctgagagcagaggacacagctgtttactattgtacccgcgacaactatggcaggaactacgactacggtatggactattggggacaagggacattggttacagtgagcagtggcggcgggggcagcggaggaggaggcagcggtggcggaggcagcgagatagtgctcacgcagtcacccgcgactctcagtctctcacctggggaacgagctaccctgacgtgctctgctacctcctcagtgtcatatattcactggtatcagcaacggcccgggcagtcccctagattgctcatttatagtacctctaatctggcctcaggtatccctgcacgattttctggatctggttcaggttctgattacaccctcactatctctagcctggagcctgaagactttgccgtttattactgccagcagaggtctagctccccattcacctttgggagtgggaccaaggttgaaattaaagagtctccaaaggcacaggcctcctcagtgcccactgcacaaccccaagcagagggcagcctcgccaaggcaaccacagccccagccaccacccgtaacacaggaagaggcggcgaagagaagaaaaaggagaaggagaaagaggaacaagaagagagagagacaaagacaccaatctacatttgggccccgctcgcaggcacatgtggagtgctcctcctctccctggtgattaccctgtactgcaaaaggggccgcaaaaaactcctttacatttttaagcagccttttatgaggccagtacagacgactcaagaggaagacgggtgctcatgccgctttcctgaggaggaggaaggagggtgcgaactgcgcgttaagttctcccgatcagccgacgcgcctgcttacaagcagggccagaaccaactgtacaacgagctgaatctcggtagacgggaagagtacgacgtgttggacaaacggagaggccgcgacccagaaatgggcggcaagcctcgcaggaaaaacccccaggagggactgtacaatgagttgcagaaagataagatggcagaagcttatagcgagatcggaatgaagggggaaaggagacgagggaaaggacacgacggcctttatcagggcctgtccacagcaacaaaagatacgtatgacgccctccatatgcaggcacttccaccacggtgataa

SEQ ID NO: 324 - protein, 500 aa, synthetic construct
  REGION 1..500: note = CAR E6 IgD/8/4-1BB/CD3z sequence
MALPVTALLLPLALLLHAARPEVQLVESGGGLVKPGGSLRLSCAASGFTFSRYGMSWVRQAPGKRLEWVSTISGGGTYIYYPDSVKGRFTISRDNAKNTLYLQMNSLRAEDTAVYYCTRDNYGRNYDYGMDYWGQGTLVTVSSGGGGSGGGGSGGGGSEIVLTQSPATLSLSPGERATLTCSATSSVSYIHWYQQRPGQSPRLLIYSTSNLASGIPARFSGSGSGSDYTLTISSLEPEDFAVYYCQQRSSSPFTFGSGTKVEIKESPKAQASSVPTAQPQAEGSLAKATTAPATTRNTGRGGEEKKKEKEKEEQEERETKTPIYIWAPLAGTCGVLLLSLVITLYCKRGRKKLLYIFKQPFMRPVQTTQEEDGCSCRFPEEEEGGCELRVKFSRSADAPAYKQGQNQLYNELNLGRREEYDVLDKRRGRDPEMGGKPRRKNPQEGLYNELQKDKMAEAYSEIGMKGERRRGKGHDGLYQGLSTATKDTYDALHMQALPPR

SEQ ID NO: 325 - DNA, 475 bp, synthetic construct
  misc_feature 1..475: note = E6 CAR IgD8 pcDH gBLOCK sequence
  source 1..475: mol_type = other DNA
agtacctctaatctggcctcaggtatccctgcacgattttctggatctggttcaggttctgattacaccctcactatctctagcctggagcctgaagactttgccgtttattactgccagcagaggtctagctccccattcacctttgggagtgggaccaaggttgaaattaaagagtctccaaaggcacaggcctcctcagtgcccactgcacaaccccaagcagagggcagcctcgccaaggcaaccacagccccagccaccacccgtaacacaggaagaggcggcgaagagaagaaaaaggagaaggagaaagaggaacaagaagagagagagacaaagacaccaatctacatttgggccccgctcgcaggcacatgtggagtgctcctcctctccctggtgattaccctgtactgcaaaaggggccgcaaaaaactcctttacatttttaagcagccttttatgaggccag

SEQ ID NO: 326 - DNA, 502 bp, synthetic construct
  misc_feature 1..502: note = E6 CAR BB 3 pCDH gBLOCK sequence
  source 1..502: mol_type = other DNA
acatttttaagcagccttttatgaggccagtacagacgactcaagaggaagacgggtgctcatgccgctttcctgaggaggaggaaggagggtgcgaactgcgcgttaagttctcccgatcagccgacgcgcctgcttacaagcagggccagaaccaactgtacaacgagctgaatctcggtagacgggaagagtacgacgtgttggacaaacggagaggccgcgacccagaaatgggcggcaagcctcgcaggaaaaacccccaggagggactgtacaatgagttgcagaaagataagatggcagaagcttatagcgagatcggaatgaagggggaaaggagacgagggaaaggacacgacggcctttatcagggcctgtccacagcaacaaaagatacgtatgacgccctccatatgcaggcacttccaccacggtgataagtttaaacccgctgatcaggcggccgcgaaggatctgcgatcgctccggtgcccgtcag

SEQ ID NO: 327 - DNA, 1500 bp, synthetic construct
  misc_feature 1..1500: note = CAR E6 IgD/4/4-1BB/CD3z sequence
  source 1..1500: mol_type = other DNA
atggccctgcccgtgaccgctttgctgctccccctggcgctgctgctgcacgccgccaggccagaggtccagctggttgagagtggcggtgggctggttaagcctggcggctccctgcggctgagctgcgccgcgagtggatttactttcagccgatatgggatgagttgggtgcggcaagctcccgggaagaggctggaatgggtctcaacaatctccggggggggcacttacatctattaccccgactcagtcaaggggagatttaccatttcacgagacaacgctaagaataccctgtatttgcagatgaattctctgagagcagaggacacagctgtttactattgtacccgcgacaactatggcaggaactacgactacggtatggactattggggacaagggacattggttacagtgagcagtggcggcgggggcagcggaggaggaggcagcggtggcggaggcagcgagatagtgctcacgcagtcacccgcgactctcagtctctcacctggggaacgagctaccctgacgtgctctgctacctcctcagtgtcatatattcactggtatcagcaacggcccgggcagtcccctagattgctcatttatagtacctctaatctggcctcaggtatccctgcacgattttctggatctggttcaggttctgattacaccctcactatctctagcctggagcctgaagactttgccgtttattactgccagcagaggtctagctccccattcacctttgggagtgggaccaaggttgaaattaaagagtctccaaaggcacaggcctcctcagtgcccactgcacaaccccaagcagagggcagcctcgccaaggcaaccacagccccagccaccacccgtaacacaggaagaggcggcgaagagaagaaaaaggagaaggagaaagaggaacaagaagagagagagacaaagacaccaatggccctgattgtgctggggggcgtcgccggcctcctgcttttcattgggctaggcatcttcttcaaaaggggccgcaaaaaactcctttacatttttaagcagccttttatgaggccagtacagacgactcaagaggaagacgggtgctcatgccgctttcctgaggaggaggaaggagggtgcgaactgcgcgttaagttctcccgatcagccgacgcgcctgcttacaagcagggccagaaccaactgtacaacgagctgaatctcggtagacgggaagagtacgacgtgttggacaaacggagaggccgcgacccagaaatgggcggcaagcctcgcaggaaaaacccccaggagggactgtacaatgagttgcagaaagataagatggcagaagcttatagcgagatcggaatgaagggggaaaggagacgagggaaaggacacgacggcctttatcagggcctgtccacagcaacaaaagatacgtatgacgccctccatatgcaggcacttccaccacggtgataa

SEQ ID NO: 328 - protein, 498 aa, synthetic construct
  REGION 1..498: note = CAR E6 IgD/4/4-1BB/CD3z sequence
MALPVTALLLPLALLLHAARPEVQLVESGGGLVKPGGSLRLSCAASGFTFSRYGMSWVRQAPGKRLEWVSTISGGGTYIYYPDSVKGRFTISRDNAKNTLYLQMNSLRAEDTAVYYCTRDNYGRNYDYGMDYWGQGTLVTVSSGGGGSGGGGSGGGGSEIVLTQSPATLSLSPGERATLTCSATSSVSYIHWYQQRPGQSPRLLIYSTSNLASGIPARFSGSGSGSDYTLTISSLEPEDFAVYYCQQRSSSPFTFGSGTKVEIKESPKAQASSVPTAQPQAEGSLAKATTAPATTRNTGRGGEEKKKEKEKEEQEERETKTPMALIVLGGVAGLLLFIGLGIFFKRGRKKLLYIFKQPFMRPVQTTQEEDGCSCRFPEEEEGGCELRVKFSRSADAPAYKQGQNQLYNELNLGRREEYDVLDKRRGRDPEMGGKPRRKNPQEGLYNELQKDKMAEAYSEIGMKGERRRGKGHDGLYQGLSTATKDTYDALHMQALPPR

SEQ ID NO: 329 - DNA, 469 bp, synthetic construct
  misc_feature 1..469: note = E6 CAR IgD4 pcDH gBLOCK sequence
  source 1..469: mol_type = other DNA
agtacctctaatctggcctcaggtatccctgcacgattttctggatctggttcaggttctgattacaccctcactatctctagcctggagcctgaagactttgccgtttattactgccagcagaggtctagctccccattcacctttgggagtgggaccaaggttgaaattaaagagtctccaaaggcacaggcctcctcagtgcccactgcacaaccccaagcagagggcagcctcgccaaggcaaccacagccccagccaccacccgtaacacaggaagaggcggcgaagagaagaaaaaggagaaggagaaagaggaacaagaagagagagagacaaagacaccaatggccctgattgtgctggggggcgtcgccggcctcctgcttttcattgggctaggcatcttcttcaaaaggggccgcaaaaaactcctttacatttttaagcagccttttatgaggccag

SEQ ID NO: 330 - DNA, 1461 bp, synthetic construct
  misc_feature 1..1461: note = CAR E6 X4/8/4-1BB/CD3z sequence
  source 1..1461: mol_type = other DNA
atggccctgcccgtgaccgctttgctgctccccctggcgctgctgctgcacgccgccaggccagaggtccagctggttgagagtggcggtgggctggttaagcctggcggctccctgcggctgagctgcgccgcgagtggatttactttcagccgatatgggatgagttgggtgcggcaagctcccgggaagaggctggaatgggtctcaacaatctccggggggggcacttacatctattaccccgactcagtcaaggggagatttaccatttcacgagacaacgctaagaataccctgtatttgcagatgaattctctgagagcagaggacacagctgtttactattgtacccgcgacaactatggcaggaactacgactacggtatggactattggggacaagggacattggttacagtgagcagtggcggcgggggcagcggaggaggaggcagcggtggcggaggcagcgagatagtgctcacgcagtcacccgcgactctcagtctctcacctggggaacgagctaccctgacgtgctctgctacctcctcagtgtcatatattcactggtatcagcaacggcccgggcagtcccctagattgctcatttatagtacctctaatctggcctcaggtatccctgcacgattttctggatctggttcaggttctgattacaccctcactatctctagcctggagcctgaagactttgccgtttattactgccagcagaggtctagctccccattcacctttgggagtgggaccaaggttgaaattaaagacaagacgcacaccaagccacctaaaccagctccagaactgctcggaggtcctggcaccggaaccggaggacctaccatcaaaccacctaagccacctaagcctgctcctaacctgctcggaggacctatctacatttgggccccgctcgcaggcacatgtggagtgctcctcctctccctggtgattaccctgtactgcaaaaggggccgcaaaaaactcctttacatttttaagcagccttttatgaggccagtacagacgactcaagaggaagacgggtgctcatgccgctttcctgaggaggaggaaggagggtgcgaactgcgcgttaagttctcccgatcagccgacgcgcctgcttacaagcagggccagaaccaactgtacaacgagctgaatctcggtagacgggaagagtacgacgtgttggacaaacggagaggccgcgacccagaaatgggcggcaagcctcgcaggaaaaacccccaggagggactgtacaatgagttgcagaaagataagatggcagaagcttatagcgagatcggaatgaagggggaaaggagacgagggaaaggacacgacggcctttatcagggcctgtccacagcaacaaaagatacgtatgacgccctccatatgcaggcacttccaccacggtgataa

SEQ ID NO: 331 - protein, 485 aa, synthetic construct
  REGION 1..485: note = CAR E6 X4/8/4-1BB/CD3z sequence
MALPVTALLLPLALLLHAARPEVQLVESGGGLVKPGGSLRLSCAASGFTFSRYGMSWVRQAPGKRLEWVSTISGGGTYIYYPDSVKGRFTISRDNAKNTLYLQMNSLRAEDTAVYYCTRDNYGRNYDYGMDYWGQGTLVTVSSGGGGSGGGGSGGGGSEIVLTQSPATLSLSPGERATLTCSATSSVSYIHWYQQRPGQSPRLLIYSTSNLASGIPARFSGSGSGSDYTLTISSLEPEDFAVYYCQQRSSSPFTFGSGTKVEIKDKTHTKPPKPAPELLGGPGTGTGGPTIKPPKPPKPAPNLLGGPIYIWAPLAGTCGVLLLSLVITLYCKRGRKKLLYIFKQPFMRPVQTTQEEDGCSCRFPEEEEGGCELRVKFSRSADAPAYKQGQNQLYNELNLGRREEYDVLDKRRGRDPEMGGKPRRKNPQEGLYNELQKDKMAEAYSEIGMKGERRRGKGHDGLYQGLSTATKDTYDALHMQALPPR

SEQ ID NO: 332 - DNA, 430 bp, synthetic construct
  misc_feature 1..430: note = E6 CAR X48 pCDH gBLOCK sequence
  source 1..430: mol_type = other DNA
agtacctctaatctggcctcaggtatccctgcacgattttctggatctggttcaggttctgattacaccctcactatctctagcctggagcctgaagactttgccgtttattactgccagcagaggtctagctccccattcacctttgggagtgggaccaaggttgaaattaaagacaagacgcacaccaagccacctaaaccagctccagaactgctcggaggtcctggcaccggaaccggaggacctaccatcaaaccacctaagccacctaagcctgctcctaacctgctcggaggacctatctacatttgggccccgctcgcaggcacatgtggagtgctcctcctctccctggtgattaccctgtactgcaaaaggggccgcaaaaaactcctttacatttttaagcagccttttatgaggccag

SEQ ID NO: 333 - DNA, 1455 bp, synthetic construct
  misc_feature 1..1455: note = CAR E6 X4/4/4-1BB/CD3z sequence
  source 1..1455: mol_type = other DNA
atggccctgcccgtgaccgctttgctgctccccctggcgctgctgctgcacgccgccaggccagaggtccagctggttgagagtggcggtgggctggttaagcctggcggctccctgcggctgagctgcgccgcgagtggatttactttcagccgatatgggatgagttgggtgcggcaagctcccgggaagaggctggaatgggtctcaacaatctccggggggggcacttacatctattaccccgactcagtcaaggggagatttaccatttcacgagacaacgctaagaataccctgtatttgcagatgaattctctgagagcagaggacacagctgtttactattgtacccgcgacaactatggcaggaactacgactacggtatggactattggggacaagggacattggttacagtgagcagtggcggcgggggcagcggaggaggaggcagcggtggcggaggcagcgagatagtgctcacgcagtcacccgcgactctcagtctctcacctggggaacgagctaccctgacgtgctctgctacctcctcagtgtcatatattcactggtatcagcaacggcccgggcagtcccctagattgctcatttatagtacctctaatctggcctcaggtatccctgcacgattttctggatctggttcaggttctgattacaccctcactatctctagcctggagcctgaagactttgccgtttattactgccagcagaggtctagctccccattcacctttgggagtgggaccaaggttgaaattaaagacaagacgcacaccaagccacctaaaccagctccagaactgctcggaggtcctggcaccggaaccggaggacctaccatcaaaccacctaagccacctaagcctgctcctaacctgctcggaggacctatggccctgattgtgctggggggcgtcgccggcctcctgcttttcattgggctaggcatcttcttcaaaaggggccgcaaaaaactcctttacatttttaagcagccttttatgaggccagtacagacgactcaagaggaagacgggtgctcatgccgctttcctgaggaggaggaaggagggtgcgaactgcgcgttaagttctcccgatcagccgacgcgcctgcttacaagcagggccagaaccaactgtacaacgagctgaatctcggtagacgggaagagtacgacgtgttggacaaacggagaggccgcgacccagaaatgggcggcaagcctcgcaggaaaaacccccaggagggactgtacaatgagttgcagaaagataagatggcagaagcttatagcgagatcggaatgaagggggaaaggagacgagggaaaggacacgacggcctttatcagggcctgtccacagcaacaaaagatacgtatgacgccctccatatgcaggcacttccaccacggtgataa

SEQ ID NO: 334 - protein, 483 aa, synthetic construct
  REGION 1..483: note = CAR E6 X4/4/4-1BB/CD3z sequence
MALPVTALLLPLALLLHAARPEVQLVESGGGLVKPGGSLRLSCAASGFTFSRYGMSWVRQAPGKRLEWVSTISGGGTYIYYPDSVKGRFTISRDNAKNTLYLQMNSLRAEDTAVYYCTRDNYGRNYDYGMDYWGQGTLVTVSSGGGGSGGGGSGGGGSEIVLTQSPATLSLSPGERATLTCSATSSVSYIHWYQQRPGQSPRLLIYSTSNLASGIPARFSGSGSGSDYTLTISSLEPEDFAVYYCQQRSSSPFTFGSGTKVEIKDKTHTKPPKPAPELLGGPGTGTGGPTIKPPKPPKPAPNLLGGPMALIVLGGVAGLLLFIGLGIFFKRGRKKLLYIFKQPFMRPVQTTQEEDGCSCRFPEEEEGGCELRVKFSRSADAPAYKQGQNQLYNELNLGRREEYDVLDKRRGRDPEMGGKPRRKNPQEGLYNELQKDKMAEAYSEIGMKGERRRGKGHDGLYQGLSTATKDTYDALHMQALPPR

SEQ ID NO: 335 - DNA, 424 bp, synthetic construct
  misc_feature 1..424: note = E6 CAR X44 pCDH gBLOCK sequence
  source 1..424: mol_type = other DNA
agtacctctaatctggcctcaggtatccctgcacgattttctggatctggttcaggttctgattacaccctcactatctctagcctggagcctgaagactttgccgtttattactgccagcagaggtctagctccccattcacctttgggagtgggaccaaggttgaaattaaagacaagacgcacaccaagccacctaaaccagctccagaactgctcggaggtcctggcaccggaaccggaggacctaccatcaaaccacctaagccacctaagcctgctcctaacctgctcggaggacctatggccctgattgtgctggggggcgtcgccggcctcctgcttttcattgggctaggcatcttcttcaaaaggggccgcaaaaaactcctttacatttttaagcagccttttatgaggccag

SEQ ID NO: 336 - DNA, 1461 bp, synthetic construct
  misc_feature 1..1461: note = CAR E6 8+4/4/4-1BB/CD3z sequence
  source 1..1461: mol_type = other DNA
atggccctgcccgtgaccgctttgctgctccccctggcgctgctgctgcacgccgccaggccagaggtccagctggttgagagtggcggtgggctggttaagcctggcggctccctgcggctgagctgcgccgcgagtggatttactttcagccgatatgggatgagttgggtgcggcaagctcccgggaagaggctggaatgggtctcaacaatctccggggggggcacttacatctattaccccgactcagtcaaggggagatttaccatttcacgagacaacgctaagaataccctgtatttgcagatgaattctctgagagcagaggacacagctgtttactattgtacccgcgacaactatggcaggaactacgactacggtatggactattggggacaagggacattggttacagtgagcagtggcggcgggggcagcggaggaggaggcagcggtggcggaggcagcgagatagtgctcacgcagtcacccgcgactctcagtctctcacctggggaacgagctaccctgacgtgctctgctacctcctcagtgtcatatattcactggtatcagcaacggcccgggcagtcccctagattgctcatttatagtacctctaatctggcctcaggtatccctgcacgattttctggatctggttcaggttctgattacaccctcactatctctagcctggagcctgaagactttgccgtttattactgccagcagaggtctagctccccattcacctttgggagtgggaccaaggttgaaattaaaacgacaaccccggcccccagaccaccaacgccagcccccaccatcgccagccaacccctgtctctgagaccagaagcctgtaggcctgccgccggtggagctgtgcacacaagaggactggatttcgcctgtgatatggccctgattgtgctggggggcgtcgccggcctcctgcttttcattgggctaggcatcttcttcaaaaggggccgcaaaaaactcctttacatttttaagcagccttttatgaggccagtacagacgactcaagaggaagacgggtgctcatgccgctttcctgaggaggaggaaggagggtgcgaactgcgcgttaagttctcccgatcagccgacgcgcctgcttacaagcagggccagaaccaactgtacaacgagctgaatctcggtagacgggaagagtacgacgtgttggacaaacggagaggccgcgacccagaaatgggcggcaagcctcgcaggaaaaacccccaggagggactgtacaatgagttgcagaaagataagatggcagaagcttatagcgagatcggaatgaagggggaaaggagacgagggaaaggacacgacggcctttatcagggcctgtccacagcaacaaaagatacgtatgacgccctccatatgcaggcacttccaccacggtgataa

SEQ ID NO: 337 - protein, 485 aa, synthetic construct
  REGION 1..485: note = CAR E6 8+4/4/4-1BB/CD3z sequence
MALPVTALLLPLALLLHAARPEVQLVESGGGLVKPGGSLRLSCAASGFTFSRYGMSWVRQAPGKRLEWVSTISGGGTYIYYPDSVKGRFTISRDNAKNTLYLQMNSLRAEDTAVYYCTRDNYGRNYDYGMDYWGQGTLVTVSSGGGGSGGGGSGGGGSEIVLTQSPATLSLSPGERATLTCSATSSVSYIHWYQQRPGQSPRLLIYSTSNLASGIPARFSGSGSGSDYTLTISSLEPEDFAVYYCQQRSSSPFTFGSGTKVEIKTTTPAPRPPTPAPTIASQPLSLRPEACRPAAGGAVHTRGLDFACDMALIVLGGVAGLLLFIGLGIFFKRGRKKLLYIFKQPFMRPVQTTQEEDGCSCRFPEEEEGGCELRVKFSRSADAPAYKQGQNQLYNELNLGRREEYDVLDKRRGRDPEMGGKPRRKNPQEGLYNELQKDKMAEAYSEIGMKGERRRGKGHDGLYQGLSTATKDTYDALHMQALPPR

SEQ ID NO: 338 - DNA, 430 bp, synthetic construct
  misc_feature 1..430: note = E6 CAR CD844 pCDH gBLOCK sequence
  source 1..430: mol_type = other DNA
agtacctctaatctggcctcaggtatccctgcacgattttctggatctggttcaggttctgattacaccctcactatctctagcctggagcctgaagactttgccgtttattactgccagcagaggtctagctccccattcacctttgggagtgggaccaaggttgaaattaaaacgacaaccccggcccccagaccaccaacgccagcccccaccatcgccagccaacccctgtctctgagaccagaagcctgtaggcctgccgccggtggagctgtgcacacaagaggactggatttcgcctgtgatatggccctgattgtgctggggggcgtcgccggcctcctgcttttcattgggctaggcatcttcttcaaaaggggccgcaaaaaactcctttacatttttaagcagccttttatgaggccag

SEQ ID NO: 339 - DNA, 820 bp, synthetic construct
  misc_feature 1..820: note = Humanized C2 scFV sequence in CAR
  source 1..820: mol_type = other DNA
gagggccaccatggccttgccagtgacggccctgctgctgccattggctcttctgttgcacgctgccaggcctgaagtgcagctcgtagagagtggcgggggactggtgaagcccggtggaagcctcagactcagttgcgccgcctcaggtttcactttttcaggttacgccatgtcctgggtaagacaggcaccggggaaaggactcgagtgggtgtctactatcagctcaggaggcacttatatatattatcctgactctgtaaaaggccgatttacgatttctcgcgacaatgcaaagaactccctctacctccaaatgaacagtcttagggcagaagacactgctgtatactattgtgcacgcctcggcggcgacaactactacgagtactttgacgtgtgggggaaagggactaccgtgacagtttcaagcggaggaggtggctcaggtggaggcgggtcaggggggggaggaagtgatattgtgctcacacaatccccagcctccctggctgtgtctcccggccaacgcgctacaattacatgtcgggcctccaaaagcgtgagcaccagcggctacagctacatgcactggtatcaacagaaaccaggacaaccccccaaactgttgatttatctcgcttcaaacttggagtccggcgtgcctgcgcgcttttcagggagtgggagcggcacagattttacgctgactatcaaccccgtagaagcaaacgatacagcgaattattattgtcaacattcccgggaactcccctttacgttcggcgggggcacaaaggtcgaaattaagagaacc

SEQ ID NO: 340 - protein, 249 aa, synthetic construct; identical to SEQ ID NO: 239
  REGION 1..249: note = Humanized C2 scFV sequence in CAR

SEQ ID NO: 341 - DNA, 729 bp, synthetic construct
  misc_feature 1..729: note = Humanized E6 scFV sequence in CAR
  source 1..729: mol_type = other DNA
gaggtccagctggttgagagtggcggtgggctggttaagcctggcggctccctgcggctgagctgcgccgcgagtggatttactttcagccgatatgggatgagttgggtgcggcaagctcccgggaagaggctggaatgggtctcaacaatctccggggggggcacttacatctattaccccgactcagtcaaggggagatttaccatttcacgagacaacgctaagaataccctgtatttgcagatgaattctctgagagcagaggacacagctgtttactattgtacccgcgacaactatggcaggaactacgactacggtatggactattggggacaagggacattggttacagtgagcagtggcggcgggggcagcggaggaggaggcagcggtggggggggcagcgagatagtgctcacgcagtcacccgcgactctcagtctctcacctggggaacgagctaccctgacgtgctctgctacctcctcagtgtcatatattcactggtatcagcaacggcccgggcagtcccctagattgctcatttatagtacctctaatctggcctcaggtatccctgcacgattttctggatctggttcaggttctgattacaccctcactatctctagcctggagcctgaagactttgccgtttattactgccagcagaggtctagctccccattcacctttgggagtgggaccaaggttgaaattaaa

SEQ ID NO: 342 - protein, 243 aa, synthetic construct; identical to SEQ ID NO: 233
  REGION 1..243: note = Humanized E6 scFV sequence in CAR

SEQ ID NO: 343 - DNA, 63 bp, synthetic construct
  misc_feature 1..63: note = CD8 leader sequence
  source 1..63: mol_type = other DNA
atggccctgcccgtgaccgctttgctgctccccctggcgctgctgctgcacgccgccaggcca

SEQ ID NO: 344 - protein, 21 aa, synthetic construct
  REGION 1..21: note = CD8 leader sequence
MALPVTALLLPLALLLHAARP

SEQ ID NO: 345 - DNA, 135 bp, synthetic construct
  misc_feature 1..135: note = CD8 hinge domain sequence
  source 1..135: mol_type = other DNA
acgacaaccccggcccccagaccaccaacgccagcccccaccatcgccagccaacccctgtctctgagaccagaagcctgtaggcctgccgccggtggagctgtgcacacaagaggactggatttcgcctgtgat

SEQ ID NO: 346 - protein, 45 aa, synthetic construct
  REGION 1..45: note = CD8 hinge domain sequence
TTTPAPRPPTPAPTIASQPLSLRPEACRPAAGGAVHTRGLDFACD

SEQ ID NO: 347 - DNA, 66 bp, synthetic construct
  misc_feature 1..66: note = CD4 hinge domain sequence
  source 1..66: mol_type = other DNA
tcgggacaggtcctgctggaatccaacatcaaggttctgcccacatggtccaccccggtgcagcca

SEQ ID NO: 348 - protein, 22 aa, synthetic construct
  REGION 1..22: note = CD4 hinge domain sequence
SGQVLLESNIKVLPTWSTPVQP

SEQ ID NO: 349 - DNA, 45 bp, synthetic construct
  misc_feature 1..45: note = CD28 hinge domain sequence
  source 1..45: mol_type = other DNA
aaacacctttgtccaagtcccctatttcccggaccttctaagccc

SEQ ID NO: 350 - protein, 15 aa, synthetic construct
  REGION 1..15: note = CD28 hinge domain sequence
KHLCPSPLFPGPSKP

SEQ ID NO: 351 - DNA, 201 bp, synthetic construct
  misc_feature 1..201: note = CD8+CD4 hinge domain sequence
  source 1..201: mol_type = other DNA
acgacaaccccggcccccagaccaccaacgccagcccccaccatcgccagccaacccctgtctctgagaccagaagcctgtaggcctgccgccggtggagctgtgcacacaagaggactggatttcgcctgtgattcgggacaggtcctgctggaatccaacatcaaggttctgcccacatggtccaccccggtgcagcca

SEQ ID NO: 352 - protein, 67 aa, synthetic construct
  REGION 1..67: note = CD8+CD4 hinge domain sequence
TTTPAPRPPTPAPTIASQPLSLRPEACRPAAGGAVHTRGLDFACDSGQVLLESNIKVLPTWSTPVQP

SEQ ID NO: 353 - DNA, 180 bp, synthetic construct
  misc_feature 1..180: note = CD8+CD28 hinge domain sequence
  source 1..180: mol_type = other DNA
acgacaaccccggcccccagaccaccaacgccagcccccaccatcgccagccaacccctgtctctgagaccagaagcctgtaggcctgccgccggtggagctgtgcacacaagaggactggatttcgcctgtgataaacacctttgtccaagtcccctatttcccggaccttctaagccc

SEQ ID NO: 354 - protein, 60 aa, synthetic construct
  REGION 1..60: note = CD8+CD28 hinge domain sequence
TTTPAPRPPTPAPTIASQPLSLRPEACRPAAGGAVHTRGLDFACDKHLCPSPLFPGPSKP

SEQ ID NO: 355 - DNA, 111 bp, synthetic construct
  misc_feature 1..111: note = CD28+CD4 hinge domain sequence
  source 1..111: mol_type = other DNA
aaacacctttgtccaagtcccctatttcccggaccttctaagccctcgggacaggtcctgctggaatccaacatcaaggttctgcccacatggtccaccccggtgcagcca

SEQ ID NO: 356 - protein, 37 aa, synthetic construct
  REGION 1..37: note = CD28+CD4 hinge domain sequence
KHLCPSPLFPGPSKPSGQVLLESNIKVLPTWSTPVQP

SEQ ID NO: 357 - DNA, 174 bp, synthetic construct
  misc_feature 1..174: note = Human IgD hinge domain sequence
  source 1..174: mol_type = other DNA
gagtctccaaaggcacaggcctcctcagtgcccactgcacaaccccaagcagagggcagcctcgccaaggcaaccacagccccagccaccacccgtaacacaggaagaggcggcgaagagaagaaaaaggagaaggagaaagaggaacaagaagagagagagacaaagacacca

SEQ ID NO: 358 - protein, 58 aa, synthetic construct
  REGION 1..58: note = Human IgD hinge domain sequence
ESPKAQASSVPTAQPQAEGSLAKATTAPATTRNTGRGGEEKKKEKEKEEQEERETKTP

SEQ ID NO: 359 - DNA, 129 bp, synthetic construct
  misc_feature 1..129: note = X4 linker (IgG1 and IgG2 modified hinge region) sequence
  source 1..129: mol_type = other DNA
gacaagacgcacaccaagccacctaaaccagctccagaactgctcggaggtcctggcaccggaaccggaggacctaccatcaaaccacctaagccacctaagcctgctcctaacctgctcggaggacct

SEQ ID NO: 360 - protein, 43 aa, synthetic construct
  REGION 1..43: note = X4 linker (IgG1 and IgG2 modified hinge region) sequence
DKTHTKPPKPAPELLGGPGTGTGGPTIKPPKPPKPAPNLLGGP

SEQ ID NO: 361 - DNA, 63 bp, synthetic construct
  misc_feature 1..63: note = CD3 zeta transmembrane domain sequence
  source 1..63: mol_type = other DNA
ctctgctacctgctggatggaatcctcttcatctatggtgtcattctcactgccttgttcctg

SEQ ID NO: 362 - protein, 21 aa, synthetic construct
  REGION 1..21: note = CD3 zeta transmembrane domain sequence
LCYLLDGILFIYGVILTALFL

SEQ ID NO: 363 - DNA, 72 bp, synthetic construct
  misc_feature 1..72: note = CD8 transmembrane domain sequence
  source 1..72: mol_type = other DNA
atctacatttgggccccgctcgcaggcacatgtggagtgctcctcctctccctggtgattaccctgtactgc

SEQ ID NO: 364 - protein, 24 aa, synthetic construct
  REGION 1..24: note = CD8 transmembrane domain sequence
IYIWAPLAGTCGVLLLSLVITLYC

SEQ ID NO: 365 - DNA, 66 bp, synthetic construct
  misc_feature 1..66: note = CD4 transmembrane domain sequence
  source 1..66: mol_type = other DNA
atggccctgattgtgctggggggcgtcgccggcctcctgcttttcattgggctaggcatcttcttc

SEQ ID NO: 366 - protein, 22 aa, synthetic construct
  REGION 1..22: note = CD4 transmembrane domain sequence
MALIVLGGVAGLLLFIGLGIFF

SEQ ID NO: 367 - DNA, 81 bp, synthetic construct
  misc_feature 1..81: note = CD28 transmembrane domain sequence
  source 1..81: mol_type = other DNA
ttttgggtgctggtggtggttggtggagtcctggcttgctatagcttgctagtaacagtggcctttattattttctgggtg

SEQ ID NO: 368 - protein, 27 aa, synthetic construct
  REGION 1..27: note = CD28 transmembrane domain sequence
FWVLVVVGGVLACYSLLVTVAFIIFWV

SEQ ID NO: 369 - DNA, 81 bp, synthetic construct
  misc_feature 1..81: note = 4-1BB transmembrane domain sequence
  source 1..81: mol_type = other DNA
atcatctccttctttcttgcgctgacgtcgactgcgttgctcttcctgctgttcttcctcacgctccgtttctctgttgtt

SEQ ID NO: 370 - protein, 27 aa, synthetic construct
  REGION 1..27: note = 4-1BB transmembrane domain sequence
IISFFLALTSTALLFLLFFLTLRFSVV

SEQ ID NO: 371 - DNA, 78 bp, synthetic construct
  misc_feature 1..78: note = OX40 transmembrane domain sequence
  source 1..78: mol_type = other DNA
gttgccgccatcctgggcctgggcctggtgctggggctgctgggccccctggccatcctgctggccctgtacctgctc

SEQ ID NO: 372 - protein, 26 aa, synthetic construct
  REGION 1..26: note = OX40 transmembrane domain sequence
VAAILGLGLVLGLLGPLAILLALYLL

SEQ ID NO: 373 - DNA, 336 bp, synthetic construct
  misc_feature 1..336: note = CD3 zeta domain sequence
  source 1..336: mol_type = other DNA
cgcgttaagttctcccgatcagccgacgcgcctgcttacaagcagggccagaaccaactgtacaacgagctgaatctcggtagacgggaagagtacgacgtgttggacaaacggagaggccgcgacccagaaatgggcggcaagcctcgcaggaaaaacccccaggagggactgtacaatgagttgcagaaagataagatggcagaagcttatagcgagatcggaatgaagggggaaaggagacgagggaaaggacacgacggcctttatcagggcctgtccacagcaacaaaagatacgtatgacgccctccatatgcaggcacttccaccacgg

SEQ ID NO: 374 - protein, 112 aa, synthetic construct
  REGION 1..112: note = CD3 zeta domain sequence
RVKFSRSADAPAYKQGQNQLYNELNLGRREEYDVLDKRRGRDPEMGGKPRRKNPQEGLYNELQKDKMAEAYSEIGMKGERRRGKGHDGLYQGLSTATKDTYDALHMQALPPR

SEQ ID NO: 375 - DNA, 336 bp, synthetic construct
  misc_feature 1..336: note = CD3 zeta domain variant sequence
  source 1..336: mol_type = other DNA
agagtgaagttcagcaggagcgcagacgcccccgcgtaccagcagggccagaaccagctctataacgagctcaatctaggacgaagagaggagtacgatgttttggacaagagacgtggccgggaccctgagatggggggaaagccgagaaggaagaaccctcaggaaggcctgtacaatgaactgcagaaagataagatggcggaggcctacagtgagattgggatgaaaggcgagcgccggaggggcaaggggcacgatggcctttaccagggtctcagtacagccaccaaggacacctacgacgcccttcacatgcaggccctgccccctcgc

SEQ ID NO: 376 - protein, 112 aa, synthetic construct
  REGION 1..112: note = CD3 zeta domain variant sequence
RVKFSRSADAPAYQQGQNQLYNELNLGRREEYDVLDKRRGRDPEMGGKPRRKNPQEGLYNELQKDKMAEAYSEIGMKGERRRGKGHDGLYQGLSTATKDTYDALHMQALPPR

SEQ ID NO: 377 - DNA, 123 bp, synthetic construct
  misc_feature 1..123: note = CD28 domain sequence
  source 1..123: mol_type = other DNA
agaagcaagcggtctcggctcctgcattctgattacatgaacatgaccccaagaagaccaggccccaccaggaaacattaccagccctacgctccgccacgcgacttcgctgcctaccggtcc

SEQ ID NO: 378 - protein, 41 aa, synthetic construct
  REGION 1..41: note = CD28 domain sequence
RSKRSRLLHSDYMNMTPRRPGPTRKHYQPYAPPRDFAAYRS

SEQ ID NO: 379 - DNA, 126 bp, synthetic construct
  misc_feature 1..126: note = 4-1BB domain sequence
  source 1..126: mol_type = other DNA
aaaaggggccgcaaaaaactcctttacatttttaagcagccttttatgaggccagtacagacgactcaagaggaagacgggtgctcatgccgctttcctgaggaggaggaaggagggtgcgaactg

SEQ ID NO: 380 - protein, 42 aa, synthetic construct
  REGION 1..42: note = 4-1BB domain sequence
KRGRKKLLYIFKQPFMRPVQTTQEEDGCSCRFPEEEEGGCEL

SEQ ID NO: 381 - DNA, 111 bp, synthetic construct
  misc_feature 1..111: note = OX40 domain sequence
  source 1..111: mol_type = other DNA
cggagggaccagaggctgccccccgatgcccacaagccccctgggggaggcagtttccggacccccatccaagaggagcaggccgacgcccactccaccctggccaagatc

SEQ ID NO: 382 - protein, 37 aa, synthetic construct
  REGION 1..37: note = OX40 domain sequence
RRDQRLPPDAHKPPGGGSFRTPIQEEQADAHSTLAKI

SEQ ID NO: 383 - DNA, 723 bp, synthetic construct
  misc_feature 1..723: note = Humanized anti CD3 scFV clone 12F6 (VH-VL) sequence
  source 1..723: mol_type = other DNA
caggtgcagctggtgcagagcggaggtggagtggtccaacctggaagatctctgagactgagctgtaaggctagcgggtacacgttcacatcttacacgatgcactgggtgaggcaagcccccggtaagggcctggaatggatcggatatataaaccccagctcagggtataccaaatataatcagaagttcaaagatcggttcacgatttctgctgataaaagtaagtccaccgctttcctgcagatggactcactcaggccagaagatactggtgtttatttctgtgcaaggtggcaggactacgacgtgtactttgactattgggggcaggggacgcctgtaacagtatcaagcggcggtggcggatccggcggtggcggatccggcggtggcggatccgatattcagatgacccagagcccgagcagcctgagcgcgagcgtgggcgatcgcgtgaccatgacctgccgcgcgagcagcagcgtgagctatatgcattggtatcagcagaccccgggcaaagcgccgaaaccgtggatttatgcgaccagcaacctggcgagcggcgtgccgagccgctttagcggcagcggcagcggcaccgattataccctgaccattagcagcctgcagccggaagatattgcgacctattattgccagcagtggagcagcaacccgccgacctttggccagggcaccaaactgcagattacccgc

SEQ ID NO: 384 - protein, 241 aa, synthetic construct
  REGION 1..241: note = Humanized anti CD3 scFV clone 12F6 (VH-VL) sequence
QVQLVQSGGGVVQPGRSLRLSCKASGYTFTSYTMHWVRQAPGKGLEWIGYINPSSGYTKYNQKFKDRFTISADKSKSTAFLQMDSLRPEDTGVYFCARWQDYDVYFDYWGQGTPVTVSSGGGGSGGGGSGGGGSDIQMTQSPSSLSASVGDRVTMTCRASSSVSYMHWYQQTPGKAPKPWIYATSNLASGVPSRFSGSGSGTDYTLTISSLQPEDIATYYCQQWSSNPPTFGQGTKLQITR

SEQ ID NO: 385 - DNA, 723 bp, synthetic construct
  misc_feature 1..723: note = Humanized anti CD3 scFV clone 12F6 (VL-VH) sequence
  source 1..723: mol_type = other DNA
gatattcagatgacccagagcccgagcagcctgagcgcgagcgtgggcgatcgcgtgaccatgacctgccgcgcgagcagcagcgtgagctatatgcattggtatcagcagaccccgggcaaagcgccgaaaccgtggatttatgcgaccagcaacctggcgagcggcgtgccgagccgctttagcggcagcggcagcggcaccgattataccctgaccattagcagcctgcagccggaagatattgcgacctattattgccagcagtggagcagcaacccgccgacctttggccagggcaccaaactgcagattacccgcggcggtggcggatccggcggtggcggatccggcggtggcggatcccaggtgcagctggtgcagagcggaggtggagtggtccaacctggaagatctctgagactgagctgtaaggctagcgggtacacgttcacatcttacacgatgcactgggtgaggcaagcccccggtaagggcctggaatggatcggatatataaaccccagctcagggtataccaaatataatcagaagttcaaagatcggttcacgatttctgctgataaaagtaagtccaccgctttcctgcagatggactcactcaggccagaagatactggtgtttatttctgtgcaaggtggcaggactacgacgtgtactttgactattgggggcaggggacgcctgtaacagtatcaagc

SEQ ID NO: 386 - protein, 241 aa, synthetic construct
  REGION 1..241: note = Humanized anti CD3 scFV clone 12F6 (VL-VH) sequence
DIQMTQSPSSLSASVGDRVTMTCRASSSVSYMHWYQQTPGKAPKPWIYATSNLASGVPSRFSGSGSGTDYTLTISSLQPEDIATYYCQQWSSNPPTFGQGTKLQITRGGGGSGGGGSGGGGSQVQLVQSGGGVVQPGRSLRLSCKASGYTFTSYTMHWVRQAPGKGLEWIGYINPSSGYTKYNQKFKDRFTISADKSKSTAFLQMDSLRPEDTGVYFCARWQDYDVYFDYWGQGTPVTVSS

SEQ ID NO: 387 - DNA, 723 bp, synthetic construct
  misc_feature 1..723: note = Humanized anti CD3 scFV clone OKT3 (VH-VL) sequence
  source 1..723: mol_type = other DNA
caggtgcagctggtgcagagcggaggcggagtggtgcagcctggaagaagcctgcgcctgagctgcaaagcgagcggctatacctttacccgctataccatgcattgggtgcgccaggcgccgggcaaaggcctggaatggattggctatattaacccgagccgcggctataccaactataaccagaaagtgaaagatcgctttaccattagcaccgataaaagcaaaagcaccgcgtttctgcagatggatagcctgcgcccggaagataccgcggtgtattattgcgcgcgctattatgatgatcattattgcctggattattggggccagggcaccaccctgaccgtgagcagcggcggtggcggatccggcggtggcggatccggcggtggcggatccgatattcagatgacccagagcccgagcagcctgagcgcgagcgtgggcgatcgcgtgaccattacctgcagcgcgagcagcagcgtgagctatatgaactggtatcagcagaccccgggcaaagcgccgaaacgctggatttatgataccagcaaactggcgagcggcgtgccgagccgctttagcggcagcggcagcggcaccgattatacctttaccattagcagcctgcagccggaagatattgcgacctattattgccagcagtggagcagcaacccgtttacctttggccagggcaccaaactgcagattacccgc

SEQ ID NO: 388 - protein, 241 aa, synthetic construct
  REGION 1..241: note = Humanized anti CD3 scFV clone OKT3 (VH-VL) sequence
QVQLVQSGGGVVQPGRSLRLSCKASGYTFTRYTMHWVRQAPGKGLEWIGYINPSRGYTNYNQKVKDRFTISTDKSKSTAFLQMDSLRPEDTAVYYCARYYDDHYCLDYWGQGTTLTVSSGGGGSGGGGSGGGGSDIQMTQSPSSLSASVGDRVTITCSASSSVSYMNWYQQTPGKAPKRWIYDTSKLASGVPSRFSGSGSGTDYTFTISSLQPEDIATYYCQQWSSNPFTFGQGTKLQITR

SEQ ID NO: 389 - DNA, 723 bp, synthetic construct
  misc_feature 1..723: note = Humanized anti CD3 scFV clone OKT3 (VH-VL) sequence
  source 1..723: mol_type = other DNA
gatattcagatgacccagagcccgagcagcctgagcgcgagcgtgggcgatcgcgtgaccattacctgcagcgcgagcagcagcgtgagctatatgaactggtatcagcagaccccgggcaaagcgccgaaacgctggatttatgataccagcaaactggcgagcggcgtgccgagccgctttagcggcagcggcagcggcaccgattatacctttaccattagcagcctgcagccggaagatattgcgacctattattgccagcagtggagcagcaacccgtttacctttggccagggcaccaaactgcagattacccgcggcggtggcggatccggcggtggcggatccggcggtggcggatcccaggtgcagctggtgcagagcggaggcggagtggtgcagcctggaagaagcctgcgcctgagctgcaaagcgagcggctatacctttacccgctataccatgcattgggtgcgccaggcgccgggcaaaggcctggaatggattggctatattaacccgagccgcggctataccaactataaccagaaagtgaaagatcgctttaccattagcaccgataaaagcaaaagcaccgcgtttctgcagatggatagcctgcgcccggaagataccgcggtgtattattgcgcgcgctattatgatgatcattattgcctggattattggggccagggcaccaccctgaccgtgagcagc

SEQ ID NO: 390 - protein, 241 aa, synthetic construct
  REGION 1..241: note = Humanized anti CD3 scFV clone OKT3 (VH-VL) sequence
DIQMTQSPSSLSASVGDRVTITCSASSSVSYMNWYQQTPGKAPKRWIYDTSKLASGVPSRFSGSGSGTDYTFTISSLQPEDIATYYCQQWSSNPFTFGQGTKLQITRGGGGSGGGGSGGGGSQVQLVQSGGGVVQPGRSLRLSCKASGYTFTRYTMHWVRQAPGKGLEWIGYINPSRGYTNYNQKVKDRFTISTDKSKSTAFLQMDSLRPEDTAVYYCARYYDDHYCLDYWGQGTTLTVSS

SEQ ID NO: 391 - DNA, 729 bp, synthetic construct; identical to SEQ ID NO: 232
  misc_feature 1..729: note = HumanizeE6 scFV (VH-VL) sequence
  source 1..729: mol_type = other DNA

SEQ ID NO: 392 - protein, 243 aa, synthetic construct; identical to SEQ ID NO: 233
  REGION 1..243: note = HumanizeE6 scFV (VH-VL) sequence

SEQ ID NO: 393 - DNA, 729 bp, synthetic construct
  misc_feature 1..729: note = HumanizeE6 scFV (VL-VH) sequence
  source 1..729: mol_type = other DNA
gaaattgtgttgacacagtctccagccaccctgtctttgtctccaggggaaagagccaccctcacctgcagcgccaccagcagtgttagctacatccactggtaccaacagaggcctggccagagccccaggctcctcatctatagcacctccaacctggccagcggcatcccagccaggttcagtggcagtgggtctgggagcgactacactctcaccatcagcagcctagagcctgaagattttgcagtttattactgtcagcagcgtagcagctcccctttcacctttggcagcggcaccaaagtggaaattaaaggcggtggcggatccggcggtggcggatccggcggtggcggatccgaggtgcagctggtggagtctgggggaggcctggtcaagcctggggggtccctgagactctcctgtgcagcctctggattcaccttcagtaggtatggcatgagctgggtccgccaggctccagggaagaggctggagtgggtctcaaccattagtggcggaggcacctacatatactacccagactcagtgaagggccgattcaccatctccagagacaacgccaagaacaccctgtatctgcaaatgaacagcctgagagccgaggacacggctgtgtattactgtaccagagataactatggccgcaactatgattatggcatggattattggggccagggcaccctggtgaccgtgagcagc

SEQ ID NO: 394 - protein, 243 aa, synthetic construct
  REGION 1..243: note = HumanizeE6 scFV (VL-VH) sequence
EIVLTQSPATLSLSPGERATLTCSATSSVSYIHWYQQRPGQSPRLLIYSTSNLASGIPARFSGSGSGSDYTLTISSLEPEDFAVYYCQQRSSSPFTFGSGTKVEIKGGGGSGGGGSGGGGSEVQLVESGGGLVKPGGSLRLSCAASGFTFSRYGMSWVRQAPGKRLEWVSTISGGGTYIYYPDSVKGRFTISRDNAKNTLYLQMNSLRAEDTAVYYCTRDNYGRNYDYGMDYWGQGTLVTVSS

SEQ ID NO: 395 - DNA, 747 bp, synthetic construct; identical to SEQ ID NO: 238
  misc_feature 1..747: note = HumanizeC2 scFV (VH-VL) sequence
  source 1..747: mol_type = other DNA

SEQ ID NO: 396 - protein, 249 aa, synthetic construct; identical to SEQ ID NO: 239
  REGION 1..249: note = HumanizeC2 scFV (VH-VL) sequence

SEQ ID NO: 397 - DNA, 747 bp, synthetic construct
  misc_feature 1..747: note = HumanizeE6 scFV (VL-VH) sequence
  source 1..747: mol_type = other DNA
gacattgtgctgacccagtctccagcctccttggccgtgtctccaggacagagggccaccatcacctgcagagccagtaagagtgtcagtaccagcggatactcctacatgcactggtatcagcagaaaccaggacaacctcctaaactcctgatttacctggcatccaatctggagagcggggtcccagccaggttcagcggcagtgggtctgggaccgatttcaccctcacaattaatcctgtggaagctaatgatactgcaaattattactgtcagcacagtagggagctgcctttcacattcggcggagggaccaaggtggagatcaaacgaactggcggtggcggatccggcggtggcggatccggcggtggcggatccgaggtgcagctggtggagtctgggggaggcctggtcaagcctggggggtccctgagactctcctgtgcagcctctggattcaccttcagtggctatgccatgagctgggtccgccaggctccagggaaggggctggagtgggtctcaaccattagtagtggcggaacctacatatactaccccgactcagtgaagggccgattcaccatctccagagacaacgccaagaactcactgtatctgcaaatgaacagcctgagagccgaggacacggccgtgtattactgtgcgagacttgggggggataattactacgaatacttcgatgtctggggcaaagggaccacggtcaccgtctcctcc

SEQ ID NO: 398 - protein, 249 aa, synthetic construct
  REGION 1..249: note = HumanizeE6 scFV (VL-VH) sequence
DIVLTQSPASLAVSPGQRATITCRASKSVSTSGYSYMHWYQQKPGQPPKLLIYLASNLESGVPARFSGSGSGTDFTLTINPVEANDTANYYCQHSRELPFTFGGGTKVEIKRTGGGGSGGGGSGGGGSEVQLVESGGGLVKPGGSLRLSCAASGFTFSGYAMSWVRQAPGKGLEWVSTISSGGTYIYYPDSVKGRFTISRDNAKNSLYLQMNSLRAEDTAVYYCARLGGDNYYEYFDVWGKGTTVTVSS

SEQ ID NO: 399 - DNA, 15 bp, synthetic construct
  misc_feature 1..15: note = G4S1 linker sequence
  source 1..15: mol_type = other DNA
ggcggtggcggatcc

SEQ ID NO: 400 - protein, 5 aa, synthetic construct
  REGION 1..5: note = G4S1 linker sequence
GGGGS

SEQ ID NO: 401 - DNA, 45 bp, synthetic construct
  misc_feature 1..45: note = [G4S1]x3 linker sequence
  source 1..45: mol_type = other DNA
ggcggtggcggatccggcggtggcggatccggcggtggcggatcc

SEQ ID NO: 402 - protein, 15 aa, synthetic construct
  REGION 1..15: note = [G4S1]x3 linker sequence
GGGGSGGGGSGGGGS

SEQ ID NO: 403 - DNA, 24 bp, synthetic construct
  misc_feature 1..24: note = 8 aa GS linker sequence
  source 1..24: mol_type = other DNA
ggcggttccggcggtggatccgga

SEQ ID NO: 404 - protein, 8 aa, synthetic construct
  REGION 1..8: note = 8 aa GS linker sequence
GGSGGGSG

SEQ ID NO: 405 - DNA, 39 bp, synthetic construct
  misc_feature 1..39: note = 12 aa GS linker sequence
  source 1..39: mol_type = other DNA
ggcggttccggcggtggatccggcggtggcggatccgga

SEQ ID NO: 406 - protein, 12 aa, synthetic construct
  REGION 1..12: note = 12 aa GS linker sequence
GGSGGGSGGGSG

SEQ ID NO: 407 - DNA, 39 bp, synthetic construct
  misc_feature 1..39: note = 13 aa GS linker sequence
  source 1..39: mol_type = other DNA
ggcggtggatccggcggtggcggatccggcggtggatcc

SEQ ID NO: 408 - protein, 13 aa, synthetic construct
  REGION 1..13: note = 13 aa GS linker sequence
GGGSGGGGSGGGS

SEQ ID NO: 409 - DNA, 66 bp, synthetic construct
  misc_feature 1..66: note = 22 aa GS linker sequence
  source 1..66: mol_type = other DNA
ggcggtggaagcggcggtggcggatccggcagcggcggaagcggcggtggcggatccggcggtgga

SEQ ID NO: 410 - protein, 22 aa, synthetic construct
  REGION 1..22: note = 22 aa GS linker sequence
GGGSGGGGSGSGGSGGGGSGGG

SEQ ID NO: 411 - DNA, 78 bp, synthetic construct
  misc_feature 1..78: note = 24 aa GS linker sequence
  source 1..78: mol_type = other DNA
ggcggttccggcggtggatccggcggtggcggatccggaggcggttccggcggtggatccggcggtggcggatccgga

SEQ ID NO: 412 - protein, 24 aa, synthetic construct
  REGION 1..24: note = 24 aa GS linker sequence
GGSGGGSGGGSGGGSGGGSGGGSG

SEQ ID NO: 413 - DNA, 357 bp, synthetic construct
  misc_feature 1..357: note = Mouse C3 Heavy chain variable region sequence
  source 1..357: mol_type = other DNA
caggtccagctgcagcagtctgggcctgagctggtgaggcctggggtctcagtgaagatttcctgcaagggttccggctacagattcactgattatgctatgaactgggtgaagcagagtcatgcaaagagtctagagtggattggagttattagtactttctctggtaatacaaacttcaaccagaagtttaagggcaaggccacaatgactgtagacaaatcctccagcacagcctatatggaacttgccagattgacatctgaggattctgccatgtattactgtgcaagatcggattactacggcccatactttgactactggggccaaggcaccactctcacagtctcctca

SEQ ID NO: 414 - protein, 119 aa, synthetic construct
  REGION 1..119: note = Mouse C3 Heavy chain variable region sequence
QVQLQQSGPELVRPGVSVKISCKGSGYRFTDYAMNWVKQSHAKSLEWIGVISTFSGNTNFNQKFKGKATMTVDKSSSTAYMELARLTSEDSAMYYCARSDYYGPYFDYWGQGTTLTVSS

SEQ ID NO: 415 - DNA, 90 bp, synthetic construct
  misc_feature 1..90: note = Mouse C3 heavy chain variable framework region 1 (FWR1) sequence
  source 1..90: mol_type = other DNA
caggtccagctgcagcagtctgggcctgagctggtgaggcctggggtctcagtgaagatttcctgcaagggttccggctacagattcact

SEQ ID NO: 416 - protein, 30 aa, synthetic construct
  REGION 1..30: note = Mouse C3 heavy chain variable framework region 1 (FWR1) sequence
QVQLQQSGPELVRPGVSVKISCKGSGYRFT

SEQ ID NO: 417 - DNA, 15 bp, synthetic construct
  misc_feature 1..15: note = Mouse C3 heavy chain variable complementarity determining regions 1 (CDR1) sequence
  source 1..15: mol_type = other DNA
gattatgctatgaac

SEQ ID NO: 418 - protein, 5 aa, synthetic construct
  REGION 1..5: note = Mouse C3 heavy chain variable complementarity determining regions 1 (CDR1) sequence
DYAMN

SEQ ID NO: 419 - DNA, 42 bp, synthetic construct
  misc_feature 1..42: note = Mouse C3 heavy chain variable framework region 2 (FWR2) sequence
  source 1..42: mol_type = other DNA
tgggtgaagcagagtcatgcaaagagtctagagtggattgga

SEQ ID NO: 420 - protein, 14 aa, synthetic construct
  REGION 1..14: note = Mouse C3 heavy chain variable framework region 2 (FWR2) sequence
WVKQSHAKSLEWIG

SEQ ID NO: 421 - DNA, 51 bp, synthetic construct
  misc_feature 1..51: note = Mouse C3 heavy chain variable complementarity determining regions 2 (CDR2) sequence
  source 1..51: mol_type = other DNA
gttattagtactttctctggtaatacaaacttcaaccagaagtttaagggc

SEQ ID NO: 422 - protein, 17 aa, synthetic construct
  REGION 1..17: note = Mouse C3 heavy chain variable complementarity determining regions 2 (CDR2) sequence
VISTFSGNTNFNQKFKG

SEQ ID NO: 423 - DNA, 96 bp, synthetic construct
  misc_feature 1..96: note = Mouse C3 heavy chain variable framework region 3 (FWR3) acid sequence
  source 1..96: mol_type = other DNA
aaggccacaatgactgtagacaaatcctccagcacagcctatatggaacttgccagattgacatctgaggattctgccatgtattactgtgcaaga

SEQ ID NO: 424 - protein, 32 aa, synthetic construct
  REGION 1..32: note = Mouse C3 heavy chain variable framework region 3 (FWR3) acid sequence
KATMTVDKSSSTAYMELARLTSEDSAMYYCAR

SEQ ID NO: 425 - DNA, 30 bp, synthetic construct
  misc_feature 1..30: note = Mouse C3 heavy chain variable complementarity determining regions 3 (CDR3) sequence
  source 1..30: mol_type = other DNA
tcggattactacggcccatactttgactac

SEQ ID NO: 426 - protein, 10 aa, synthetic construct
  REGION 1..10: note = Mouse C3 heavy chain variable complementarity determining regions 3 (CDR3) sequence
SDYYGPYFDY

SEQ ID NO: 427 - DNA, 296 bp, synthetic construct
  misc_feature 1..296: note = IGHV1-18*04 heavy chain variable region sequence
  source 1..296: mol_type = other DNA
caggttcagctggtgcagtctggagctgaggtgaagaagcctggggcctcagtgaaggtctcctgcaaggcttctggttacacctttaccagctacggtatcagctgggtgcgacaggcccctggacaagggcttgagtggatgggatggatcagcgcttacaatggtaacacaaactatgcacagaagctccagggcagagtcaccatgaccacagacacatccacgagcacagcctacatggagctgaggagcctgagatctgacgacacggccgtgtattactgtgcgagaga

SEQ ID NO: 428 - protein, 98 aa, synthetic construct
  REGION 1..98: note = IGHV1-18*04 heavy chain variable region sequence
QVQLVQSGAEVKKPGASVKVSCKASGYTFTSYGISWVRQAPGQGLEWMGWISAYNGNTNYAQKLQGRVTMTTDTSTSTAYMELRSLRSDDTAVYYCAR

SEQ ID NO: 429 - DNA, 90 bp, synthetic construct
  misc_feature 1..90: note = IGHV1-18*04 heavy chain variable framework region 1 (FWR1) sequence
  source 1..90: mol_type = other DNA
caggttcagctggtgcagtctggagctgaggtgaagaagcctggggcctcagtgaaggtctcctgcaaggcttctggttacacctttacc

SEQ ID NO: 430 - protein, 30 aa, synthetic construct
  REGION 1..30: note = IGHV1-18*04 heavy chain variable framework region 1 (FWR1) sequence
QVQLVQSGAEVKKPGASVKVSCKASGYTFT

SEQ ID NO: 431 - DNA, 15 bp, synthetic construct
  misc_feature 1..15: note = IGHV1-18*04 heavy chain variable complementarity determining regions 1 (CDR1) sequence
  source 1..15: mol_type = other DNA
agctacggtatcagc

SEQ ID NO: 432 - protein, 5 aa, synthetic construct
  REGION 1..5: note = IGHV1-18*04 heavy chain variable complementarity determining regions 1 (CDR1) sequence
SYGIS

SEQ ID NO: 433 - DNA, 42 bp, synthetic construct
  misc_feature 1..42: note = IGHV1-18*04 heavy chain variable framework region 2 (FWR2) sequence
  source 1..42: mol_type = other DNA
tgggtgcgacaggcccctggacaagggcttgagtggatggga

SEQ ID NO: 434 - protein, 14 aa, synthetic construct
  REGION 1..14: note = IGHV1-18*04 heavy chain variable framework region 2 (FWR2) sequence
WVRQAPGQGLEWMG

SEQ ID NO: 435 - DNA, 51 bp, synthetic construct
  misc_feature 1..51: note = IGHV1-18*04 heavy chain variable complementarity determining regions 2 (CDR2) sequence
  source 1..51: mol_type = other DNA
tggatcagcgcttacaatggtaacacaaactatgcacagaagctccagggc

SEQ ID NO: 436 - protein, 17 aa, synthetic construct
  REGION 1..17: note = IGHV1-18*04 heavy chain variable complementarity determining regions 2 (CDR2) sequence
WISAYNGNTNYAQKLQG

SEQ ID NO: 437 - DNA, 96 bp, synthetic construct
  misc_feature 1..96: note = IGHV1-18*04 heavy chain variable framework region 3 (FWR3) sequence
  source 1..96: mol_type = other DNA
agagtcaccatgaccacagacacatccacgagcacagcctacatggagctgaggagcctgagatctgacgacacggccgtgtattactgtgcgaga

SEQ ID NO: 438 - protein, 32 aa, synthetic construct
  REGION 1..32: note = IGHV1-18*04 heavy chain variable framework region 3 (FWR3) sequence
RVTMTTDTSTSTAYMELRSLRSDDTAVYYCAR

SEQ ID NO: 439 - DNA, 357 bp, synthetic construct
  misc_feature 1..357: note = Humanized C3 heavy chain variable region sequence
  source 1..357: mol_type = other DNA
caggttcagctggtgcagtctggagctgaggtgaagaagcctggggcctcagtgaaggtctcctgcaaggcttctggttacacctttaccgactacgccatgaactgggtgcgacaggcccctggacaagggcttgagtggatgggagtgatcagcaccttcagcggtaacacaaacttcaaccagaagttcaagggcagagtcaccatgaccacagacacatccacgagcacagcctacatggagctgaggagcctgagatctgacgacacggccgtgtattactgtgcgagaagcgactactacggcccatacttcgactactggggccagggcaccaccctgaccgtgtccagc

SEQ ID NO: 440 - protein, 119 aa, synthetic construct
  REGION 1..119: note = Humanized C3 heavy chain variable region sequence
QVQLVQSGAEVKKPGASVKVSCKASGYTFTDYAMNWVRQAPGQGLEWMGVISTFSGNTNFNQKFKGRVTMTTDTSTSTAYMELRSLRSDDTAVYYCARSDYYGPYFDYWGQGTTLTVSS

SEQ ID NO: 441 - DNA, 90 bp, synthetic construct; identical to SEQ ID NO: 429
  misc_feature 1..90: note = Humanized C3 heavy chain variable framework region 1 (FWR1) acid sequence
  source 1..90: mol_type = other DNA

SEQ ID NO: 442 - protein, 30 aa, synthetic construct; identical to SEQ ID NO: 430
  REGION 1..30: note = Humanized C3 heavy chain variable framework region 1 (FWR1) acid sequence

SEQ ID NO: 443 - DNA, 15 bp, synthetic construct
  misc_feature 1..15: note = Humanized C3 heavy chain variable complementarity determining regions 1 (CDR1) sequence
  source 1..15: mol_type = other DNA
gactacgccatgaac

SEQ ID NO: 444 - protein, 5 aa, synthetic construct
  REGION 1..5: note = Humanized C3 heavy chain variable complementarity determining regions 1 (CDR1) sequence
DYAMN

SEQ ID NO: 445 - DNA, 42 bp, synthetic construct; identical to SEQ ID NO: 433
  misc_feature 1..42: note = Humanized C3 heavy chain variable framework region 2 (FWR2) acid sequence
  source 1..42: mol_type = other DNA

SEQ ID NO: 446 - protein, 14 aa, synthetic construct
  REGION 1..14: note = Humanized C3 heavy chain variable framework region 2 (FWR2) acid sequence
WVRQAPGQGLEWMG

SEQ ID NO: 447 - DNA, 51 bp, synthetic construct
  misc_feature 1..51: note = Humanized C3 heavy chain variable complementarity determining regions 2 (CDR2) sequence
  source 1..51: mol_type = other DNA
gtgatcagcaccttcagcggtaacacaaacttcaaccagaagttcaagggc

SEQ ID NO: 448 - protein, 17 aa, synthetic construct
  REGION 1..17: note = Humanized C3 heavy chain variable complementarity determining regions 2 (CDR2) sequence
VISTFSGNTNFNQKFKG

SEQ ID NO: 449 - DNA, 96 bp, synthetic construct; identical to SEQ ID NO: 437
  misc_feature 1..96: note = Humanized C3 heavy chain variable framework region 3 (FWR3) acid sequence
  source 1..96: mol_type = other DNA

SEQ ID NO: 450 - protein, 32 aa, synthetic construct; identical to SEQ ID NO: 438
  REGION 1..32: note = Humanized C3 heavy chain variable framework region 3 (FWR3) acid sequence

SEQ ID NO: 451 - DNA, 30 bp, synthetic construct
  misc_feature 1..30: note = Humanized C3 heavy chain variable complementarity determining regions 3 (CDR3) sequence
  source 1..30: mol_type = other DNA
agcgactactacggcccatacttcgactac

SEQ ID NO: 452 - protein, 10 aa, synthetic construct
  REGION 1..10: note = Humanized C3 heavy chain variable complementarity determining regions 3 (CDR3) sequence
SDYYGPYFDY

SEQ ID NO: 453 - DNA, 1353 bp, synthetic construct
  misc_feature 1..1353: note = Humanized C3 IgG1 heavy chain sequence
  source 1..1353: mol_type = other DNA
caggttcagctggtgcagtctggagctgaggtgaagaagcctggggcctcagtgaaggtctcctgcaaggcttctggttacacctttaccgactacgccatgaactgggtgcgacaggcccctggacaagggcttgagtggatgggagtgatcagcaccttcagcggtaacacaaacttcaaccagaagttcaagggcagagtcaccatgaccacagacacatccacgagcacagcctacatggagctgaggagcctgagatctgacgacacggccgtgtattactgtgcgagaagcgactactacggcccatacttcgactactggggccagggcaccaccctgaccgtgtccagcgctagcaccaagggcccatcggtcttccccctggcaccctcctccaagagcacctctgggggcacagcggccctgggctgcctggtcaaggactacttccccgaaccggtgacggtgtcgtggaactcaggcgccctgaccagcggcgtgcacaccttcccggctgtcctacagtcctcaggactctactccctcagcagcgtggtgacagtgccctccagcagcttgggcacccagacctacatctgcaacgtgaatcacaagcccagcaacaccaaggtggacaagaaagttgagcccaaatcttgtgacaaaactcacacatgcccaccgtgcccagcacctgaactcctggggggaccgtcagtcttcctcttccccccaaaacccaaggacaccctcatgatctcccggacccctgaggtcacatgcgtggtggtggacgtgagccacgaagaccctgaggtcaagttcaactggtacgtggacggcgtggaggtgcataatgccaagacaaagccgcgggaggagcagtacaacagcacgtaccgtgtggtcagcgtcctcaccgtcctgcaccaggactggctgaatggcaaggagtacaagtgcaaggtctccaacaaagccctcccagcccccatcgagaaaaccatctccaaagccaaagggcagccccgagaaccacaggtgtacaccctgcccccatcccgggaggagatgaccaagaaccaggtcagcctgacctgcctggtcaaaggcttctatcccagcgacatcgccgtggagtgggagagcaatgggcagccggagaacaactacaagaccacgcctcccgtgctggactccgacggctccttcttcctctacagcaagctcaccgtggacaagagcaggtggcagcaggggaacgtcttctcatgctccgtgatgcatgaggctctgcacaaccactacacgcagaagagcctctccctgtctccgggtaaatgataa

SEQ ID NO: 454 - protein, 449 aa, synthetic construct
  REGION 1..449: note = Humanized C3 IgG1 heavy chain sequence
QVQLVQSGAEVKKPGASVKVSCKASGYTFTDYAMNWVRQAPGQGLEWMGVISTFSGNTNFNQKFKGRVTMTTDTSTSTAYMELRSLRSDDTAVYYCARSDYYGPYFDYWGQGTTLTVSSASTKGPSVFPLAPSSKSTSGGTAALGCLVKDYFPEPVTVSWNSGALTSGVHTFPAVLQSSGLYSLSSVVTVPSSSLGTQTYICNVNHKPSNTKVDKKVEPKSCDKTHTCPPCPAPELLGGPSVFLFPPKPKDTLMISRTPEVTCVVVDVSHEDPEVKFNWYVDGVEVHNAKTKPREEQYNSTYRVVSVLTVLHQDWLNGKEYKCKVSNKALPAPIEKTISKAKGQPREPQVYTLPPSREEMTKNQVSLTCLVKGFYPSDIAVEWESNGQPENNYKTTPPVLDSDGSFFLYSKLTVDKSRWQQGNVFSCSVMHEALHNHYTQKSLSLSPGK

SEQ ID NO: 455 - DNA, 1341 bp, synthetic construct
  misc_feature 1..1341: note = Humanized C3 IgG2 heavy chain sequence
  source 1..1341: mol_type = other DNA
caggttcagctggtgcagtctggagctgaggtgaagaagcctggggcctcagtgaaggtctcctgcaaggcttctggttacacctttaccgactacgccatgaactgggtgcgacaggcccctggacaagggcttgagtggatgggagtgatcagcaccttcagcggtaacacaaacttcaaccagaagttcaagggcagagtcaccatgaccacagacacatccacgagcacagcctacatggagctgaggagcctgagatctgacgacacggccgtgtattactgtgcgagaagcgactactacggcccatacttcgactactggggccagggcaccaccctgaccgtgtccagcgcctccaccaagggcccatcggtcttccccctggcgccctgctccaggagcacctccgagagcacagccgccctgggctgcctggtcaaggactacttccccgaaccggtgacggtgtcgtggaactcaggcgctctgaccagcggcgtgcacaccttcccagctgtcctacagtcctcaggactctactccctcagcagcgtggtgaccgtgccctccagcaacttcggcacccagacctacacctgcaacgtagatcacaagcccagcaacaccaaggtggacaagacagttgagcgcaaatgttgtgtcgagtgcccaccgtgcccagcaccacctgtggcaggaccgtcagtcttcctcttccccccaaaacccaaggacaccctcatgatctcccggacccctgaggtcacgtgcgtggtggtggacgtgagccacgaagaccccgaggtccagttcaactggtacgtggacggcgtggaggtgcataatgccaagacaaagccacgggaggagcagttcaacagcacgttccgtgtggtcagcgtcctcaccgttgtgcaccaggactggctgaacggcaaggagtacaagtgcaaggtctccaacaaaggcctcccagcccccatcgagaaaaccatctccaaaaccaaagggcagccccgagaaccacaggtgtacaccctgcccccatcccgggaggagatgaccaagaaccaggtcagcctgacctgcctggtcaaaggcttctaccccagcgacatcgccgtggagtgggagagcaatgggcagccggagaacaactacaagaccacacctcccatgctggactccgacggctccttcttcctctacagcaagctcaccgtggacaagagcaggtggcagcaggggaacgtcttctcatgctccgtgatgcatgaggctctgcacaaccactacacgcagaagagcctctccctgtctccgggtaaatagtaa

SEQ ID NO: 456 - protein, 445 aa, synthetic construct
  REGION 1..445: note = Humanized C3 IgG2 heavy chain sequence
QVQLVQSGAEVKKPGASVKVSCKASGYTFTDYAMNWVRQAPGQGLEWMGVISTFSGNTNFNQKFKGRVTMTTDTSTSTAYMELRSLRSDDTAVYYCARSDYYGPYFDYWGQGTTLTVSSASTKGPSVFPLAPCSRSTSESTAALGCLVKDYFPEPVTVSWNSGALTSGVHTFPAVLQSSGLYSLSSVVTVPSSNFGTQTYTCNVDHKPSNTKVDKTVERKCCVECPPCPAPPVAGPSVFLFPPKPKDTLMISRTPEVTCVVVDVSHEDPEVQFNWYVDGVEVHNAKTKPREEQFNSTFRVVSVLTVVHQDWLNGKEYKCKVSNKGLPAPIEKTISKTKGQPREPQVYTLPPSREEMTKNQVSLTCLVKGFYPSDIAVEWESNGQPENNYKTTPPMLDSDGSFFLYSKLTVDKSRWQQGNVFSCSVMHEALHNHYTQKSLSLSPGK

SEQ ID NO: 457 - DNA, 545 bp, synthetic construct
  misc_feature 1..545: note = Humanized C3 heavy chain IgG1 gBLOCK sequence
  source 1..545: mol_type = other DNA
tgctctgggttccaggttccactggtgacgcggcccagccggcccaggttcagctggtgcagtctggagctgaggtgaagaagcctggggcctcagtgaaggtctcctgcaaggcttctggttacacctttaccgactacgccatgaactgggtgcgacaggcccctggacaagggcttgagtggatgggagtgatcagcaccttcagcggtaacacaaacttcaaccagaagttcaagggcagagtcaccatgaccacagacacatccacgagcacagcctacatggagctgaggagcctgagatctgacgacacggccgtgtattactgtgcgagaagcgactactacggcccatacttcgactactggggccagggcaccaccctgaccgtgtccagcgctagcaccaagggcccatcggtcttccccctggcaccctcctccaagagcacctctgggggcacagcggccctgggctgcctggtcaaggactacttccccgaaccggtgacggtgtcgtggaactcaggcgccctgaccagc

SEQ ID NO: 458 - DNA, 336 bp, synthetic construct
  misc_feature 1..336: note = Mouse C3 Light Chain variable region sequence
  source 1..336: mol_type = other DNA
gatgttttgatgacccaaactccactctccctgcctgtcagtcttggagatcaagcctccatctcttgcagatctagtcagaccattgtacatagtaatggaaacacctatttagaatggtacctgcagaaaccaggccagtctccaaagctcctgatctacaaagtttccaaccgattttctggggtcccagacaggttcagtggcagtggatcagggacagatttcacactcaagatcaacagagtggaggctgaggatctgggagtttattactgctttcaaggttcacatgttccattcacgttcggctcggggacaaagttggaaataaaa

SEQ ID NO: 459 - protein, 112 aa, synthetic construct
  REGION 1..112: note = Mouse C3 Light Chain variable region sequence
DVLMTQTPLSLPVSLGDQASISCRSSQTIVHSNGNTYLEWYLQKPGQSPKLLIYKVSNRFSGVPDRFSGSGSGTDFTLKINRVEAEDLGVYYCFQGSHVPFTFGSGTKLEIK

SEQ ID NO: 460 - DNA, 69 bp, synthetic construct
  misc_feature 1..69: note = Mouse C3 light chain variable framework region 1 (FWR1) sequence
  source 1..69: mol_type = other DNA
gatgttttgatgacccaaactccactctccctgcctgtcagtcttggagatcaagcctccatctcttgc

SEQ ID NO: 461 - protein, 23 aa, synthetic construct
  REGION 1..23: note = Mouse C3 light chain variable framework region 1 (FWR1) sequence
DVLMTQTPLSLPVSLGDQASISC

SEQ ID NO: 462 - DNA, 48 bp, synthetic construct
  misc_feature 1..48: note = Mouse C3 light chain variable complementarity determining regions 1 (CDR1) sequence
  source 1..48: mol_type = other DNA
agatctagtcagaccattgtacatagtaatggaaacacctatttagaa

SEQ ID NO: 463 - protein, 16 aa, synthetic construct
  REGION 1..16: note = Mouse C3 light chain variable complementarity determining regions 1 (CDR1) sequence
RSSQTIVHSNGNTYLE

SEQ ID NO: 464 - DNA, 45 bp, synthetic construct
  misc_feature 1..45: note = Mouse C3 light chain variable framework region 2 (FWR2) sequence
  source 1..45: mol_type = other DNA
tggtacctgcagaaaccaggccagtctccaaagctcctgatctac

SEQ ID NO: 465 - protein, 15 aa, synthetic construct
  REGION 1..15: note = Mouse C3 light chain variable framework region 2 (FWR2) sequence
WYLQKPGQSPKLLIY

SEQ ID NO: 466 - DNA, 21 bp, synthetic construct
  misc_feature 1..21: note = Mouse C3 light chain variable complementarity determining regions 2 (CDR2) sequence
  source 1..21: mol_type = other DNA
aaagtttccaaccgattttct

SEQ ID NO: 467 - protein, 7 aa, synthetic construct
  REGION 1..7: note = Mouse C3 light chain variable complementarity determining regions 2 (CDR2) sequence
KVSNRFS

SEQ ID NO: 468 - DNA, 96 bp, synthetic construct
  misc_feature 1..96: note = Mouse C3 light chain variable framework region 3 (FWR3) sequence
  source 1..96: mol_type = other DNA
ggggtcccagacaggttcagtggcagtggatcagggacagatttcacactcaagatcaacagagtggaggctgaggatctgggagtttattactgc

SEQ ID NO: 469 - protein, 32 aa, synthetic construct
  REGION 1..32: note = Mouse C3 light chain variable framework region 3 (FWR3) sequence
GVPDRFSGSGSGTDFTLKINRVEAEDLGVYYC

SEQ ID NO: 470 - DNA, 27 bp, synthetic construct
  misc_feature 1..27: note = Mouse C3 light chain variable complementarity determining regions 3 (CDR3) sequence
  source 1..27: mol_type = other DNA
tttcaaggttcacatgttccattcacg

SEQ ID NO: 471 - protein, 9 aa, synthetic construct
  REGION 1..9: note = Mouse C3 light chain variable complementarity determining regions 3 (CDR3) sequence
FQGSHVPFT

SEQ ID NO: 472 - DNA, 300 bp, synthetic construct
  misc_feature 1..300: note = IGKV2-29*03 light chain variable region sequence
  source 1..300: mol_type = other DNA
gatattgtgatgacccagactccactctctctgtccgtcacccctggacagccggcctccatctcctgcaagtctagtcagagcctcctgcatagtgatggaaagacctatttgtattggtacctgcagaagccaggccagtctccacagctcctgatctatgaagtttccagccggttctctggagtgccagataggttcagtggcagcgggtcagggacagatttcacactgaaaatcagccgggtggaggctgaggatgttggggtttattactgcatgcaaggtatacaccttcct

SEQ ID NO: 473 - protein, 100 aa, synthetic construct
  REGION 1..100: note = IGKV2-29*03 light chain variable region sequence
DIVMTQTPLSLSVTPGQPASISCKSSQSLLHSDGKTYLYWYLQKPGQSPQLLIYEVSSRFSGVPDRFSGSGSGTDFTLKISRVEAEDVGVYYCMQGIHLP

SEQ ID NO: 474 - DNA, 69 bp, synthetic construct
  misc_feature 1..69: note = IGKV2-29*03 light chain variable framework region 1 (FWR1) acid sequence
  source 1..69: mol_type = other DNA
gatattgtgatgacccagactccactctctctgtccgtcacccctggacagccggcctccatctcctgc

SEQ ID NO: 475 - protein, 23 aa, synthetic construct
  REGION 1..23: note = IGKV2-29*03 light chain variable framework region 1 (FWR1) acid sequence
DIVMTQTPLSLSVTPGQPASISC

SEQ ID NO: 476 - DNA, 49 bp, synthetic construct
  misc_feature 1..49: note = IGKV2-29*03 light chain variable complementarity determining regions 1 (CDR1) sequence
  source 1..49: mol_type = other DNA
aagtctagtcagagcctcctgcatagtgatggaaagacctatttsgtat

SEQ ID NO: 477 - protein, 16 aa, synthetic construct
  REGION 1..16: note = IGKV2-29*03 light chain variable complementarity determining regions 1 (CDR1) sequence
KSSQSLLHSDGKTYLY

SEQ ID NO: 478 - DNA, 45 bp, synthetic construct
  misc_feature 1..45: note = IGKV2-29*03 light chain variable framework region 2 (FWR2) sequence
  source 1..45: mol_type = other DNA
tggtacctgcagaagccaggccagtctccacagctcctgatctat

SEQ ID NO: 479 - protein, 15 aa, synthetic construct
  REGION 1..15: note = IGKV2-29*03 light chain variable framework region 2 (FWR2) sequence
WYLQKPGQSPQLLIY

SEQ ID NO: 480 - DNA, 18 bp, synthetic construct
  misc_feature 1..18: note = IGKV2-29*03 light chain variable complementarity determining regions 2 (CDR2) sequence
  source 1..18: mol_type = other DNA
gaagtttccagccggttc

SEQ ID NO: 481 - protein, 7 aa, synthetic construct
  REGION 1..7: note = IGKV2-29*03 light chain variable complementarity determining regions 2 (CDR2) sequence
EVSSRFS

SEQ ID NO: 482 - DNA, 96 bp, synthetic construct
  misc_feature 1..96: note = IGKV2-29*03 light chain variable framework region 3 (FWR3) sequence
  source 1..96: mol_type = other DNA
ggagtgccagataggttcagtggcagcgggtcagggacagatttcacactgaaaatcagccgggtggaggctgaggatgttggggtttattactgc

SEQ ID NO: 483 - protein, 32 aa, synthetic construct
  REGION 1..32: note = IGKV2-29*03 light chain variable framework region 3 (FWR3) sequence
GVPDRFSGSGSGTDFTLKISRVEAEDVGVYYC

SEQ ID NO: 484 - DNA, 21 bp, synthetic construct
  misc_feature 1..21: note = IGKV2-29*03 light chain variable complementarity determining regions3 (CDR3) sequence
  source 1..21: mol_type = other DNA
atgcaaggtatacaccttcct

SEQ ID NO: 485 - protein, 7 aa, synthetic construct
  REGION 1..7: note = IGKV2-29*03 light chain variable complementarity determining regions3 (CDR3) sequence
MQGIHLP

SEQ ID NO: 486 - DNA, 342 bp, synthetic construct
  misc_feature 1..342: note = Humanized C3 light chain variable region sequence
  source 1..342: mol_type = other DNA
gatattgtgatgacccagactccactctctctgtccgtcacccctggacagccggcctccatctcctgcaggtctagtcagaccattgtccatagtaatggaaacacctatttggagtggtacctgcagaagccaggccagtctccacagctcctgatctataaggtttccaaccggttctctggagtgccagataggttcagtggcagcgggtcagggacagatttcacactgaaaatcagccgggtggaggctgaggatgttggggtttattactgcttccaaggtagccacgtgcctttcaccttcggcggagggaccaaggtggagatcaaacgaact

SEQ ID NO: 487 - protein, 114 aa, synthetic construct
  REGION 1..114: note = Humanized C3 light chain variable region sequence
DIVMTQTPLSLSVTPGQPASISCRSSQTIVHSNGNTYLEWYLQKPGQSPQLLIYKVSNRFSGVPDRFSGSGSGTDFTLKISRVEAEDVGVYYCFQGSHVPFTFGGGTKVEIKRT

SEQ ID NO: 488 - DNA, 69 bp, synthetic construct; identical to SEQ ID NO: 474
  misc_feature 1..69: note = Humanized C3 light chain variable framework region 1 (FWR1) acid sequence
  source 1..69: mol_type = other DNA

SEQ ID NO: 489 - protein, 23 aa, synthetic construct
  REGION 1..23: note = Humanized C3 light chain variable framework region 1 (FWR1) acid sequence
DIVMTQTPLSLSVTPGQPASISC

SEQ ID NO: 490 - DNA, 47 bp, synthetic construct
  misc_feature 1..47: note = Humanized C3 light chain variable complementarity determining regions 1 (CDR1) sequence
  source 1..47: mol_type = other DNA
ggtctagtcagaccattgtccatagtaatggaaacacctatttggag

SEQ ID NO: 491 - protein, 16 aa, synthetic construct
  REGION 1..16: note = Humanized C3 light chain variable complementarity determining regions 1 (CDR1) sequence
RSSQTIVHSNGNTYLE

SEQ ID NO: 492 - DNA, 45 bp, synthetic construct; identical to SEQ ID NO: 478
  misc_feature 1..45: note = Humanized C3 light chain variable framework region 2 (FWR2) acid sequence
  source 1..45: mol_type = other DNA

SEQ ID NO: 493 - protein, 15 aa, synthetic construct
  REGION 1..15: note = Humanized C3 light chain variable framework region 2 (FWR2) acid sequence
WYLQKPGQSPQLLIY

SEQ ID NO: 494 - DNA, 21 bp, synthetic construct
  misc_feature 1..21: note = Humanized C3 light chain variable complementarity determining regions 2 (CDR2) sequence
  source 1..21: mol_type = other DNA
aaggtttccaaccggttctct

SEQ ID NO: 495 - protein, 7 aa, synthetic construct
  REGION 1..7: note = Humanized C3 light chain variable complementarity determining regions 2 (CDR2) sequence
KVSNRFS

SEQ ID NO: 496 - DNA, 96 bp, synthetic construct; identical to SEQ ID NO: 482
  misc_feature 1..96: note = Humanized C3 light chain variable framework region 3 (FWR3) acid sequence
  source 1..96: mol_type = other DNA

SEQ ID NO: 497 - protein, 32 aa, synthetic construct; identical to SEQ ID NO: 483
  REGION 1..32: note = Humanized C3 light chain variable framework region 3 (FWR3) acid sequence

SEQ ID NO: 498 - DNA, 27 bp, synthetic construct
  misc_feature 1..27: note = Humanized C3 light chain variable complementarity determining regions 3 (CDR3) sequence
  source 1..27: mol_type = other DNA
ttccaaggtagccacgtgcctttcacc

SEQ ID NO: 499 - protein, 9 aa, synthetic construct
  REGION 1..9: note = Humanized C3 light chain variable complementarity determining regions 3 (CDR3) sequence
FQGSHVPFT

SEQ ID NO: 500 - DNA, 666 bp, synthetic construct
  misc_feature 1..666: note = Humanized C3 lambda light chain sequence
  source 1..666: mol_type = other DNA
gatattgtgatgacccagactccactctctctgtccgtcacccctggacagccggcctccatctcctgcaggtctagtcagaccattgtccatagtaatggaaacacctatttggagtggtacctgcagaagccaggccagtctccacagctcctgatctataaggtttccaaccggttctctggagtgccagataggttcagtggcagcgggtcagggacagatttcacactgaaaatcagccgggtggaggctgaggatgttggggtttattactgcttccaaggtagccacgtgcctttcaccttcggcggagggaccaaggtggagatcaaacgaactggtcagcccaaggctgccccctcggtcactctgttcccgccctcctctgaggagcttcaagccaacaaggccacactggtgtgtctcataagtgacttctacccgggagccgtgacagtggcctggaaggcagatagcagccccgtcaaggcgggagtggagaccaccacaccctccaaacaaagcaacaacaagtacgcggccagcagctatctgagcctgacgcctgagcagtggaagtcccacagaagctacagctgccaggtcacgcatgaagggagcaccgtggagaagacagtggcccctacagaatgttcatagtaa

SEQ ID NO: 501 - protein, 220 aa, synthetic construct
  REGION 1..220: note = Humanized C3 lambda light chain sequence
DIVMTQTPLSLSVTPGQPASISCRSSQTIVHSNGNTYLEWYLQKPGQSPQLLIYKVSNRFSGVPDRFSGSGSGTDFTLKISRVEAEDVGVYYCFQGSHVPFTFGGGTKVEIKRTGQPKAAPSVTLFPPSSEELQANKATLVCLISDFYPGAVTVAWKADSSPVKAGVETTTPSKQSNNKYAASSYLSLTPEQWKSHRSYSCQVTHEGSTVEKTVAPTECS

SEQ ID NO: 502 - DNA, 666 bp, synthetic construct
  misc_feature 1..666: note = Humanized C3 Kappa light chain
  source 1..666: mol_type = other DNA
gatattgtgatgacccagactccactctctctgtccgtcacccctggacagccggcctccatctcctgcaggtctagtcagaccattgtccatagtaatggaaacacctatttggagtggtacctgcagaagccaggccagtctccacagctcctgatctataaggtttccaaccggttctctggagtgccagataggttcagtggcagcgggtcagggacagatttcacactgaaaatcagccgggtggaggctgaggatgttggggtttattactgcttccaaggtagccacgtgcctttcaccttcggcggagggaccaaggtggagatcaaacgaactacggtggctgcaccatctgtcttcatcttcccgccatctgatgagcagttgaaatctggaactgcctctgttgtgtgcctgctgaataacttctatcccagagaggccaaagtacagtggaaggtggataacgccctccaatcgggtaactcccaggagagtgtcacagagcaggacagcaaggacagcacctacagcctcagcagcaccctgacgctgagcaaagcagactacgagaaacacaaagtctacgcctgcgaagtcacccatcagggcctgagctcgcccgtcacaaagagcttcaacaggggagagtgttagtaa

SEQ ID NO: 503 - protein, 220 aa, synthetic construct
  REGION 1..220: note = Humanized C3 Kappa light chain
DIVMTQTPLSLSVTPGQPASISCRSSQTIVHSNGNTYLEWYLQKPGQSPQLLIYKVSNRFSGVPDRFSGSGSGTDFTLKISRVEAEDVGVYYCFQGSHVPFTFGGGTKVEIKRTTVAAPSVFIFPPSDEQLKSGTASVVCLLNNFYPREAKVQWKVDNALQSGNSQESVTEQDSKDSTYSLSSTLTLSKADYEKHKVYACEVTHQGLSSPVTKSFNRGEC

SEQ ID NO: 504 - DNA, 815 bp, synthetic construct
  misc_feature 1..815: note = Humanized C3 Kappa light gBLOCK sequence
  source 1..815: mol_type = other DNA
agctggctaggtaagcttggtaccgagctcggatccacgccaccatggagacagacacactcctgctatgggtactgctgctctgggttccaggttccactggtgacgatattgtgatgacccagactccactctctctgtccgtcacccctggacagccggcctccatctcctgcaggtctagtcagaccattgtccatagtaatggaaacacctatttggagtggtacctgcagaagccaggccagtctccacagctcctgatctataaggtttccaaccggttctctggagtgccagataggttcagtggcagcgggtcagggacagatttcacactgaaaatcagccgggtggaggctgaggatgttggggtttattactgcttccaaggtagccacgtgcctttcaccttcggcggagggaccaaggtggagatcaaacgaactacggtggctgcaccatctgtcttcatcttcccgccatctgatgagcagttgaaatctggaactgcctctgttgtgtgcctgctgaataacttctatcccagagaggccaaagtacagtggaaggtggataacgccctccaatcgggtaactcccaggagagtgtcacagagcaggacagcaaggacagcacctacagcctcagcagcaccctgacgctgagcaaagcagactacgagaaacacaaagtctacgcctgcgaagtcacccatcagggcctgagctcgcccgtcacaaagagcttcaacaggggagagtgttagtaagtttaaacccgctgatcagcctcgactgtgccttctagttgc

SEQ ID NO: 505 - DNA, 321 bp, synthetic construct
  misc_feature 1..321: note = Mouse C8 heavy chain variable region sequence
  source 1..321: mol_type = other DNA
gaagtgatggtcgtggaaagcggcggtggtctggtaaagccggggggatcccttaagctttcttgcgccgcatccgggttcacgttctccggctatgccatgtcctgggtccgacagactcccgaaaagcgcttggaatgggtggccactatctcctccggggggacgtacatctactaccccgacagtgtgaaaggaagatttacaatatctcgcgacaacgcaaaaaataccttgtatcttcaaatgagctccctgcggtcagaggacactgccatgtactattgcgcccgcctgggcggcgacaattactatgagtat

SEQ ID NO: 506 - protein, 107 aa, synthetic construct
  REGION 1..107: note = Mouse C8 heavy chain variable region sequence
EVMVVESGGGLVKPGGSLKLSCAASGFTFSGYAMSWVRQTPEKRLEWVATISSGGTYIYYPDSVKGRFTISRDNAKNTLYLQMSSLRSEDTAMYYCARLGGDNYYEY

SEQ ID NO: 507 - DNA, 15 bp, synthetic construct
  misc_feature 1..15: note = Mouse C8 heavy chain variable complementarity determining region 1 (CDR1) sequence
  source 1..15: mol_type = other DNA
ggctatgccatgtcc

SEQ ID NO: 508 - protein, 5 aa, synthetic construct
  REGION 1..5: note = Mouse C8 heavy chain variable complementarity determining region 1 (CDR1) sequence
GYAMS

SEQ ID NO: 509 - DNA, 51 bp, synthetic construct
  misc_feature 1..51: note = Mouse C8 heavy chain variable complementarity determining region 2 (CDR2) sequence
  source 1..51: mol_type = other DNA
actatctcctccggggggacgtacatctactaccccgacagtgtgaaagga

SEQ ID NO: 510 - protein, 17 aa, synthetic construct
  REGION 1..17: note = Mouse C8 heavy chain variable complementarity determining region 2 (CDR2) sequence
TISSGGTYIYYPDSVKG

SEQ ID NO: 511 - DNA, 27 bp, synthetic construct
  misc_feature 1..27: note = Mouse C8 heavy chain variable complementarity determining region 3 (CDR3) sequence
  source 1..27: mol_type = other DNA
ctgggcggcgacaattactatgagtat

SEQ ID NO: 512 - protein, 9 aa, synthetic construct
  REGION 1..9: note = Mouse C8 heavy chain variable complementarity determining region 3 (CDR3) sequence
LGGDNYYEY

SEQ ID NO: 513 - DNA, 292 bp, synthetic construct
  misc_feature 1..292: note = IGHV3-21*04 heavy chain variable region sequence
  source 1..292: mol_type = other DNA
gaggtgcagctggtggagtctgggggaggcctggtcaagcctggggggtccctgagactctcctgtgcagcctctggattcaccttcagtagctatagcatgaactgggtccgccaggctccagggaaggggctggagtgggtctcatccattagtagtagtagtagttacatatactacgcagactcagtgaagggccgattcaccatctccagagacaacgccaagaactcactgtatctgcaaatgaacagcctgagagccgaggacacggccgtgtattactgtgcga

SEQ ID NO: 514 - protein, 98 aa, synthetic construct; identical to SEQ ID NO: 27
  REGION 1..98: note = IGHV3-21*04 heavy chain variable region sequence

SEQ ID NO: 515 - DNA, 90 bp, synthetic construct; identical to SEQ ID NO: 28
  misc_feature 1..90: note = IGHV3-21*04 heavy chain variable framework region 1 (FWR1) sequence
  source 1..90: mol_type = other DNA

SEQ ID NO: 516 - protein, 30 aa, synthetic construct; identical to SEQ ID NO: 29
  REGION 1..30: note = IGHV3-21*04 heavy chain variable framework region 1 (FWR1) sequence

SEQ ID NO: 517 - DNA, 15 bp, synthetic construct
  misc_feature 1..15: note = IGHV3-21*04 heavy chain variable complementarity determining regions 1 (CDR1) sequence
  source 1..15: mol_type = other DNA
agctatagcatgaac

SEQ ID NO: 518 - protein, 5 aa, synthetic construct
  REGION 1..5: note = IGHV3-21*04 heavy chain variable complementarity determining regions 1 (CDR1) sequence
SYSMN

SEQ ID NO: 519 - DNA, 39 bp, synthetic construct
  misc_feature 1..39: note = IGHV3-21*04 heavy chain variable framework region 2 (FWR2) sequence
  source 1..39: mol_type = other DNA
tgggtccgccaggctccagggaaggggctggagtgggtc

SEQ ID NO: 520 - protein, 13 aa, synthetic construct
  REGION 1..13: note = IGHV3-21*04 heavy chain variable framework region 2 (FWR2) sequence
WVRQAPGKGLEWV

SEQ ID NO: 521 - DNA, 54 bp, synthetic construct
  misc_feature 1..54: note = IGHV3-21*04 heavy chain variable complementarity determining regions 2 (CDR2) sequence
  source 1..54: mol_type = other DNA
tcatccattagtagtagtagtagttacatatactacgcagactcagtgaagggc

SEQ ID NO: 522 - protein, 18 aa, synthetic construct
  REGION 1..18: note = IGHV3-21*04 heavy chain variable complementarity determining regions 2 (CDR2) sequence
SSISSSSSYIYYADSVKG

SEQ ID NO: 523 - DNA, 94 bp, synthetic construct
  misc_feature 1..94: note = IGHV3-21*04 heavy chain variable framework region 3 (FWR3) sequence
  source 1..94: mol_type = other DNA
cgattcaccatctccagagacaacgccaagaactcactgtatctgcaaatgaacagcctgagagccgaggacacggccgtgtattactgtgcga

SEQ ID NO: 524 - protein, 32 aa, synthetic construct; identical to SEQ ID NO: 37
  REGION 1..32: note = IGHV3-21*04 heavy chain variable framework region 3 (FWR3) sequence

SEQ ID NO: 525 - DNA, 354 bp, synthetic construct
  misc_feature 1..354: note = Humanized C8 heavy chain variable region sequence
  source 1..354: mol_type = other DNA
gaggtgcagctggtggagtctgggggaggcctggtcaagcctggggggtccctgagactctcctgtgcagcctctggattcaccttcagtggctatgccatgagctgggtccgccaggctccagggaaggggctggagtgggtctcaaccattagtagtggcggaacctacatatactaccctgactcagtgaagggccgattcaccatctccagagacaacgccaagaactcactgtatctgcaaatgaacagcctgagagccgaggacacggccgtgtattactgtgcgagactgggcggcgataactattatgaatattggggcaaagggaccacggtcaccgtctcctcc

SEQ ID NO: 526 - protein, 118 aa, synthetic construct
  REGION 1..118: note = Humanized C8 heavy chain variable region sequence
EVQLVESGGGLVKPGGSLRLSCAASGFTFSGYAMSWVRQAPGKGLEWVSTISSGGTYIYYPDSVKGRFTISRDNAKNSLYLQMNSLRAEDTAVYYCARLGGDNYYEYWGKGTTVTVSS

SEQ ID NO: 527 - DNA, 90 bp, synthetic construct; identical to SEQ ID NO: 28
  misc_feature 1..90: note = Humanized C8 heavy chain variable framework region 1 (FWR1) sequence
  source 1..90: mol_type = other DNA

SEQ ID NO: 528 - protein, 30 aa, synthetic construct; identical to SEQ ID NO: 29
  REGION 1..30: note = Humanized C8 heavy chain variable framework region 1 (FWR1) sequence

SEQ ID NO: 529 - DNA, 15 bp, synthetic construct
  misc_feature 1..15: note = Humanized C8 heavy chain variable complementarity determining region 1 (CDR1) sequence
  source 1..15: mol_type = other DNA
ggctatgccatgagc

SEQ ID NO: 530 - protein, 5 aa, synthetic construct
  REGION 1..5: note = Humanized C8 heavy chain variable complementarity determining region 1 (CDR1) sequence
GYAMS

SEQ ID NO: 531 - DNA, 42 bp, synthetic construct; identical to SEQ ID NO: 32
  misc_feature 1..42: note = Humanized C8 heavy chain variable framework region 2 (FWR2) sequence
  source 1..42: mol_type = other DNA

SEQ ID NO: 532 - protein, 14 aa, synthetic construct
  REGION 1..14: note = Humanized C8 heavy chain variable framework region 2 (FWR2) sequence
WVRQAPGKGLEWVS

SEQ ID NO: 533 - DNA, 51 bp, synthetic construct
  misc_feature 1..51: note = Humanized C8 heavy chain variable complementarity determining region 2 (CDR2) sequence
  source 1..51: mol_type = other DNA
accattagtagtggcggaacctacatatactaccctgactcagtgaagggc

SEQ ID NO: 534 - protein, 17 aa, synthetic construct
  REGION 1..17: note = Humanized C8 heavy chain variable complementarity determining region 2 (CDR2) sequence
TISSGGTYIYYPDSVKG

SEQ ID NO: 535 - DNA, 96 bp, synthetic construct; identical to SEQ ID NO: 142
  misc_feature 1..96: note = Humanized C8 heavy chain variable framework region 3 (FWR3) sequence
  source 1..96: mol_type = other DNA

SEQ ID NO: 536 - protein, 32 aa, synthetic construct; identical to SEQ ID NO: 37
  REGION 1..32: note = Humanized C8 heavy chain variable framework region 3 (FWR3) sequence

SEQ ID NO: 537 - DNA, 27 bp, synthetic construct
  misc_feature 1..27: note = Humanized C8 heavy chain variable complementarity determining region 3 (CDR3) sequence
  source 1..27: mol_type = other DNA
ctgggcggcgataactattatgaatat

SEQ ID NO: 538 - protein, 9 aa, synthetic construct
  REGION 1..9: note = Humanized C8 heavy chain variable complementarity determining region 3 (CDR3) sequence
LGGDNYYEY

SEQ ID NO: 539 - DNA, 1350 bp, synthetic construct
  misc_feature 1..1350: note = Humanized C8 IgG1 heavy chain sequence
  source 1..1350: mol_type = other DNA
gaggtgcagctggtggagtctgggggaggcctggtcaagcctggggggtccctgagactctcctgtgcagcctctggattcaccttcagtggctatgccatgagctgggtccgccaggctccagggaaggggctggagtgggtctcaaccattagtagtggcggaacctacatatactaccctgactcagtgaagggccgattcaccatctccagagacaacgccaagaactcactgtatctgcaaatgaacagcctgagagccgaggacacggccgtgtattactgtgcgagactgggcggcgataactattatgaatattggggcaaagggaccacggtcaccgtctcctccgctagcaccaagggcccatcggtcttccccctggcaccctcctccaagagcacctctgggggcacagcggccctgggctgcctggtcaaggactacttccccgaaccggtgacggtgtcgtggaactcaggcgccctgaccagcggcgtgcacaccttcccggctgtcctacagtcctcaggactctactccctcagcagcgtggtgacagtgccctccagcagcttgggcacccagacctacatctgcaacgtgaatcacaagcccagcaacaccaaggtggacaagaaagttgagcccaaatcttgtgacaaaactcacacatgcccaccgtgcccagcacctgaactcctggggggaccgtcagtcttcctcttccccccaaaacccaaggacaccctcatgatctcccggacccctgaggtcacatgcgtggtggtggacgtgagccacgaagaccctgaggtcaagttcaactggtacgtggacggcgtggaggtgcataatgccaagacaaagccgcgggaggagcagtacaacagcacgtaccgtgtggtcagcgtcctcaccgtcctgcaccaggactggctgaatggcaaggagtacaagtgcaaggtctccaacaaagccctcccagcccccatcgagaaaaccatctccaaagccaaagggcagccccgagaaccacaggtgtacaccctgcccccatcccgggaggagatgaccaagaaccaggtcagcctgacctgcctggtcaaaggcttctatcccagcgacatcgccgtggagtgggagagcaatgggcagccggagaacaactacaagaccacgcctcccgtgctggactccgacggctccttcttcctctacagcaagctcaccgtggacaagagcaggtggcagcaggggaacgtcttctcatgctccgtgatgcatgaggctctgcacaaccactacacgcagaagagcctctccctgtctccgggtaaatgataa

SEQ ID NO: 540 - protein, 448 aa, synthetic construct
  REGION 1..448: note = Humanized C8 IgG1 heavy chain sequence
EVQLVESGGGLVKPGGSLRLSCAASGFTFSGYAMSWVRQAPGKGLEWVSTISSGGTYIYYPDSVKGRFTISRDNAKNSLYLQMNSLRAEDTAVYYCARLGGDNYYEYWGKGTTVTVSSASTKGPSVFPLAPSSKSTSGGTAALGCLVKDYFPEPVTVSWNSGALTSGVHTFPAVLQSSGLYSLSSVVTVPSSSLGTQTYICNVNHKPSNTKVDKKVEPKSCDKTHTCPPCPAPELLGGPSVFLFPPKPKDTLMISRTPEVTCVVVDVSHEDPEVKFNWYVDGVEVHNAKTKPREEQYNSTYRVVSVLTVLHQDWLNGKEYKCKVSNKALPAPIEKTISKAKGQPREPQVYTLPPSREEMTKNQVSLTCLVKGFYPSDIAVEWESNGQPENNYKTTPPVLDSDGSFFLYSKLTVDKSRWQQGNVFSCSVMHEALHNHYTQKSLSLSPGK

SEQ ID NO: 541 - DNA, 1338 bp, synthetic construct
  misc_feature 1..1338: note = Humanized C8 IgG2 heavy chain sequence
  source 1..1338: mol_type = other DNA
gaggtgcagctggtggagtctgggggaggcctggtcaagcctggggggtccctgagactctcctgtgcagcctctggattcaccttcagtggctatgccatgagctgggtccgccaggctccagggaaggggctggagtgggtctcaaccattagtagtggcggaacctacatatactaccctgactcagtgaagggccgattcaccatctccagagacaacgccaagaactcactgtatctgcaaatgaacagcctgagagccgaggacacggccgtgtattactgtgcgagactgggcggcgataactattatgaatattggggcaaagggaccacggtcaccgtctcctccgcctccaccaagggcccatcggtcttccccctggcgccctgctccaggagcacctccgagagcacagccgccctgggctgcctggtcaaggactacttccccgaaccggtgacggtgtcgtggaactcaggcgctctgaccagcggcgtgcacaccttcccagctgtcctacagtcctcaggactctactccctcagcagcgtggtgaccgtgccctccagcaacttcggcacccagacctacacctgcaacgtagatcacaagcccagcaacaccaaggtggacaagacagttgagcgcaaatgttgtgtcgagtgcccaccgtgcccagcaccacctgtggcaggaccgtcagtcttcctcttccccccaaaacccaaggacaccctcatgatctcccggacccctgaggtcacgtgcgtggtggtggacgtgagccacgaagaccccgaggtccagttcaactggtacgtggacggcgtggaggtgcataatgccaagacaaagccacgggaggagcagttcaacagcacgttccgtgtggtcagcgtcctcaccgttgtgcaccaggactggctgaacggcaaggagtacaagtgcaaggtctccaacaaaggcctcccagcccccatcgagaaaaccatctccaaaaccaaagggcagccccgagaaccacaggtgtacaccctgcccccatcccgggaggagatgaccaagaaccaggtcagcctgacctgcctggtcaaaggcttctaccccagcgacatcgccgtggagtgggagagcaatgggcagccggagaacaactacaagaccacacctcccatgctggactccgacggctccttcttcctctacagcaagctcaccgtggacaagagcaggtggcagcaggggaacgtcttctcatgctccgtgatgcatgaggctctgcacaaccactacacgcagaagagcctctccctgtctccgggtaaatagtaa

SEQ ID NO: 542 - protein, 444 aa, synthetic construct
  REGION 1..444: note = Humanized C8 IgG2 heavy chain sequence
EVQLVESGGGLVKPGGSLRLSCAASGFTFSGYAMSWVRQAPGKGLEWVSTISSGGTYIYYPDSVKGRFTISRDNAKNSLYLQMNSLRAEDTAVYYCARLGGDNYYEYWGKGTTVTVSSASTKGPSVFPLAPCSRSTSESTAALGCLVKDYFPEPVTVSWNSGALTSGVHTFPAVLQSSGLYSLSSVVTVPSSNFGTQTYTCNVDHKPSNTKVDKTVERKCCVECPPCPAPPVAGPSVFLFPPKPKDTLMISRTPEVTCVVVDVSHEDPEVQFNWYVDGVEVHNAKTKPREEQFNSTFRVVSVLTVVHQDWLNGKEYKCKVSNKGLPAPIEKTISKTKGQPREPQVYTLPPSREEMTKNQVSLTCLVKGFYPSDIAVEWESNGQPENNYKTTPPMLDSDGSFFLYSKLTVDKSRWQQGNVFSCSVMHEALHNHYTQKSLSLSPGK

SEQ ID NO: 543 - DNA, 306 bp, synthetic construct
  misc_feature 1..306: note = Mouse C8 light chain variable region sequence
  source 1..306: mol_type = other DNA
gacatcgtcattacgcagacccctgccagtcttgccgtttctctgggccagagggccactatcagttacagggcgagtaagtctgtgagtaccagcggctatagttacatgcattggaaccagcagaaaccgggacagccaccacgcctgcttatttatctggtgtctaatcttgagtccggggtgcccgccaggttcagcggcagcggctctgggaccgacttcacactcaacattcatccagtggaagaagaggacgctgctacatactactgtcaacacattcgggaactgaccaggagtgaa

SEQ ID NO: 544 - protein, 102 aa, synthetic construct
  REGION 1..102: note = Mouse C8 light chain variable region sequence
DIVITQTPASLAVSLGQRATISYRASKSVSTSGYSYMHWNQQKPGQPPRLLIYLVSNLESGVPARFSGSGSGTDFTLNIHPVEEEDAATYYCQHIRELTRSE

SEQ ID NO: 545 - DNA, 45 bp, synthetic construct
  misc_feature 1..45: note = Mouse C8 light chain variable complementarity determining region 1 (CDR1) sequence
  source 1..45: mol_type = other DNA
agggcgagtaagtctgtgagtaccagcggctatagttacatgcat

SEQ ID NO: 546 - protein, 15 aa, synthetic construct
  REGION 1..15: note = Mouse C8 light chain variable complementarity determining region 1 (CDR1) sequence
RASKSVSTSGYSYMH

SEQ ID NO: 547 - DNA, 21 bp, synthetic construct
  misc_feature 1..21: note = Mouse C8 light chain variable complementarity determining region 2 (CDR2) sequence
  source 1..21: mol_type = other DNA
ctggtgtctaatcttgagtcc

SEQ ID NO: 548 - protein, 7 aa, synthetic construct
  REGION 1..7: note = Mouse C8 light chain variable complementarity determining region 2 (CDR2) sequence
LVSNLES

SEQ ID NO: 549 - DNA, 30 bp, synthetic construct
  misc_feature 1..30: note = Mouse C8 light chain variable complementarity determining region 3 (CDR3) sequence
  source 1..30: mol_type = other DNA
caacacattcgggaactgaccaggagtgaa

SEQ ID NO: 550 - protein, 10 aa, synthetic construct
  REGION 1..10: note = Mouse C8 light chain variable complementarity determining region 3 (CDR3) sequence
QHIRELTRSE

SEQ ID NO: 551 - DNA, 303 bp, synthetic construct
  misc_feature 1..303: note = NCBI germline z00023 light chain variable region sequence
  source 1..303: mol_type = other DNA
gacatcgtgatgacccagtctccagactccctggctgtgtctctgggcgagagggccaccatcaactgcaagtccagccagagtgttttatacagctccaacaataagaactacttagcttggtaccagcagaaaccaggacagcctcctaagctgctcatttactgggcatctacccgggaatccggggtccctgaccgattcagtggcagcgggtctgggacagatttcactctcaccatcagcagcctgcaggctgaagatgtggcagtttattactgtcagcaatattatagtactcct

SEQ ID NO: 552 - protein, 101 aa, synthetic construct
  REGION 1..101: note = NCBI germline z00023 light chain variable region sequence
DIVMTQSPDSLAVSLGERATINCKSSQSVLYSSNNKNYLAWYQQKPGQPPKLLIYWASTRESGVPDRFSGSGSGTDFTLTISSLQAEDVAVYYCQQYYSTP

SEQ ID NO: 553 - DNA, 69 bp, synthetic construct
  misc_feature 1..69: note = NCBI germline z00023 light chain variable framework region 1 (FWR1) acid sequence
  source 1..69: mol_type = other DNA
gacatcgtgatgacccagtctccagactccctggctgtgtctctgggcgagagggccaccatcaactgc

SEQ ID NO: 554 - protein, 23 aa, synthetic construct
  REGION 1..23: note = NCBI germline z00023 light chain variable framework region 1 (FWR1) acid sequence
DIVMTQSPDSLAVSLGERATINC

SEQ ID NO: 555 - DNA, 51 bp, synthetic construct
  misc_feature 1..51: note = NCBI germline z00023 light chain variable complementarity determining regions 1 (CDR1) sequence
  source 1..51: mol_type = other DNA
aagtccagccagagtgttttatacagctccaacaataagaactacttagct

SEQ ID NO: 556 - protein, 17 aa, synthetic construct
  REGION 1..17: note = NCBI germline z00023 light chain variable complementarity determining regions 1 (CDR1) sequence
KSSQSVLYSSNNKNYLA

SEQ ID NO: 557 - DNA, 45 bp, synthetic construct
  misc_feature 1..45: note = NCBI germline z00023 light chain variable framework region 2 (FWR2) sequence
  source 1..45: mol_type = other DNA
tggtaccagcagaaaccaggacagcctcctaagctgctcatttac

SEQ ID NO: 558 - protein, 15 aa, synthetic construct
  REGION 1..15: note = NCBI germline z00023 light chain variable framework region 2 (FWR2) sequence
WYQQKPGQPPKLLIY

SEQ ID NO: 559 - DNA, 21 bp, synthetic construct
  misc_feature 1..21: note = NCBI germline z00023 light chain variable complementarity determining regions 2 (CDR2) sequence
  source 1..21: mol_type = other DNA
tgggcatctacccgggaatcc

SEQ ID NO: 560 - protein, 7 aa, synthetic construct
  REGION 1..7: note = NCBI germline z00023 light chain variable complementarity determining regions 2 (CDR2) sequence
WASTRES

SEQ ID NO: 561 - DNA, 96 bp, synthetic construct
  misc_feature 1..96: note = NCBI germline z00023 light chain variable framework region 3 (FWR3) sequence
  source 1..96: mol_type = other DNA
ggggtccctgaccgattcagtggcagcgggtctgggacagatttcactctcaccatcagcagcctgcaggctgaagatgtggcagtttattactgt

SEQ ID NO: 562 - protein, 32 aa, synthetic construct
  REGION 1..32: note = NCBI germline z00023 light chain variable framework region 3 (FWR3) sequence
GVPDRFSGSGSGTDFTLTISSLQAEDVAVYYC

SEQ ID NO: 563 - DNA, 21 bp, synthetic construct
  misc_feature 1..21: note = NCBI germline z00023 light chain variable complementarity determining regions3 (CDR3) sequence
  source 1..21: mol_type = other DNA
cagcaatattatagtactcct

SEQ ID NO: 564 - protein, 7 aa, synthetic construct
  REGION 1..7: note = NCBI germline z00023 light chain variable complementarity determining regions3 (CDR3) sequence
QQYYSTP

SEQ ID NO: 565 - DNA, 342 bp, synthetic construct
  misc_feature 1..342: note = Humanized C8 light chain variable region sequence
  source 1..342: mol_type = other DNA
gacatcgtgatgacccagtctccagactccctggctgtgtctctgggcgagagggccaccatcaactgcagggccagcaagagtgttagcaccagcggctacagctacatgcactggtaccagcagaaaccaggacagcctcctaagctgctcatttacctggtgtctaacctggaatccggggtccctgaccgattcagtggcagcgggtctgggacagatttcactctcaccatcagcagcctgcaggctgaagatgtggcagtttattactgtcaacacattcgggaactgaccaggagtgaattcggcggagggaccaaggtggagatcaaacgaact

SEQ ID NO: 566 - protein, 114 aa, synthetic construct
  REGION 1..114: note = Humanized C8 light chain variable region sequence
DIVMTQSPDSLAVSLGERATINCRASKSVSTSGYSYMHWYQQKPGQPPKLLIYLVSNLESGVPDRFSGSGSGTDFTLTISSLQAEDVAVYYCQHIRELTRSEFGGGTKVEIKRT

SEQ ID NO: 567 - DNA, 69 bp, synthetic construct; identical to SEQ ID NO: 553
  misc_feature 1..69: note = Humanized C8 light chain variable framework region 1 (FWR1) sequence
  source 1..69: mol_type = other DNA

SEQ ID NO: 568 - protein, 23 aa, synthetic construct
  REGION 1..23: note = Humanized C8 light chain variable framework region 1 (FWR1) sequence
DIVMTQSPDSLAVSLGERATINC

SEQ ID NO: 569 - DNA, 42 bp, synthetic construct
  misc_feature 1..42: note = Humanized C8 light chain variable complementarity determining region 1 (CDR1) sequence
  source 1..42: mol_type = other DNA
agggccagcaagagtgttagcaccagcggctacagctacatg

SEQ ID NO: 570 - protein, 14 aa, synthetic construct
  REGION 1..14: note = Humanized C8 light chain variable complementarity determining region 1 (CDR1) sequence
RASKSVSTSGYSYM

SEQ ID NO: 571 - DNA, 48 bp, synthetic construct
  misc_feature 1..48: note = Humanized C8 light chain variable framework region 2 (FWR2) sequence
  source 1..48: mol_type = other DNA
cactggtaccagcagaaaccaggacagcctcctaagctgctcatttac

SEQ ID NO: 572 - protein, 16 aa, synthetic construct
  REGION 1..16: note = Humanized C8 light chain variable framework region 2 (FWR2) sequence
HWYQQKPGQPPKLLIY

SEQ ID NO: 573 - DNA, 21 bp, synthetic construct
  misc_feature 1..21: note = Humanized C8 light chain variable complementarity determining region 2 (CDR2) sequence
  source 1..21: mol_type = other DNA
ctggtgtctaacctggaatcc

SEQ ID NO: 574 - protein, 7 aa, synthetic construct
  REGION 1..7: note = Humanized C8 light chain variable complementarity determining region 2 (CDR2) sequence
LVSNLES

SEQ ID NO: 575 - DNA, 96 bp, synthetic construct; identical to SEQ ID NO: 561
  misc_feature 1..96: note = Humanized C8 light chain variable framework region 3 (FWR3) sequence
  source 1..96: mol_type = other DNA

SEQ ID NO: 576 - protein, 32 aa, synthetic construct; identical to SEQ ID NO: 562
  REGION 1..32: note = Humanized C8 light chain variable framework region 3 (FWR3) sequence

SEQ ID NO: 577 - DNA, 30 bp, synthetic construct; identical to SEQ ID NO: 549
  misc_feature 1..30: note = Humanized C8 light chain variable complementarity determining region 3 (CDR3) sequence
  source 1..30: mol_type = other DNA

SEQ ID NO: 578 - protein, 10 aa, synthetic construct
  REGION 1..10: note = Humanized C8 light chain variable complementarity determining region 3 (CDR3) sequence
QHIRELTRSE

SEQ ID NO: 579 - DNA, 666 bp, synthetic construct
  misc_feature 1..666: note = Humanized C8 Lambda light chain sequence
  source 1..666: mol_type = other DNA
gacatcgtgatgacccagtctccagactccctggctgtgtctctgggcgagagggccaccatcaactgcagggccagcaagagtgttagcaccagcggctacagctacatgcactggtaccagcagaaaccaggacagcctcctaagctgctcatttacctggtgtctaacctggaatccggggtccctgaccgattcagtggcagcgggtctgggacagatttcactctcaccatcagcagcctgcaggctgaagatgtggcagtttattactgtcaacacattcgggaactgaccaggagtgaattcggcggagggaccaaggtggagatcaaacgaactggtcagcccaaggctgccccctcggtcactctgttcccgccctcctctgaggagcttcaagccaacaaggccacactggtgtgtctcataagtgacttctacccgggagccgtgacagtggcctggaaggcagatagcagccccgtcaaggcgggagtggagaccaccacaccctccaaacaaagcaacaacaagtacgcggccagcagctatctgagcctgacgcctgagcagtggaagtcccacagaagctacagctgccaggtcacgcatgaagggagcaccgtggagaagacagtggcccctacagaatgttcatagtaa

SEQ ID NO: 580 - protein, 220 aa, synthetic construct
  REGION 1..220: note = Humanized C8 Lambda light chain sequence
DIVMTQSPDSLAVSLGERATINCRASKSVSTSGYSYMHWYQQKPGQPPKLLIYLVSNLESGVPDRFSGSGSGTDFTLTISSLQAEDVAVYYCQHIRELTRSEFGGGTKVEIKRTGQPKAAPSVTLFPPSSEELQANKATLVCLISDFYPGAVTVAWKADSSPVKAGVETTTPSKQSNNKYAASSYLSLTPEQWKSHRSYSCQVTHEGSTVEKTVAPTECS

SEQ ID NO: 581 - DNA, 666 bp, synthetic construct
  misc_feature 1..666: note = Humanized C8 Kappa light chain sequence
  source 1..666: mol_type = other DNA
gacatcgtgatgacccagtctccagactccctggctgtgtctctgggcgagagggccaccatcaactgcagggccagcaagagtgttagcaccagcggctacagctacatgcactggtaccagcagaaaccaggacagcctcctaagctgctcatttacctggtgtctaacctggaatccggggtccctgaccgattcagtggcagcgggtctgggacagatttcactctcaccatcagcagcctgcaggctgaagatgtggcagtttattactgtcaacacattcgggaactgaccaggagtgaattcggcggagggaccaaggtggagatcaaacgaactacggtggctgcaccatctgtcttcatcttcccgccatctgatgagcagttgaaatctggaactgcctctgttgtgtgcctgctgaataacttctatcccagagaggccaaagtacagtggaaggtggataacgccctccaatcgggtaactcccaggagagtgtcacagagcaggacagcaaggacagcacctacagcctcagcagcaccctgacgctgagcaaagcagactacgagaaacacaaagtctacgcctgcgaagtcacccatcagggcctgagctcgcccgtcacaaagagcttcaacaggggagagtgttagtaa

SEQ ID NO: 582 - protein, 220 aa, synthetic construct
  REGION 1..220: note = Humanized C8 Kappa light chain sequence
DIVMTQSPDSLAVSLGERATINCRASKSVSTSGYSYMHWYQQKPGQPPKLLIYLVSNLESGVPDRFSGSGSGTDFTLTISSLQAEDVAVYYCQHIRELTRSEFGGGTKVEIKRTTVAAPSVFIFPPSDEQLKSGTASVVCLLNNFYPREAKVQWKVDNALQSGNSQESVTEQDSKDSTYSLSSTLTLSKADYEKHKVYACEVTHQGLSSPVTKSFNRGEC

SEQ ID NO: 583 - DNA, 815 bp, synthetic construct
  misc_feature 1..815: note = Humanized C8 Kappa light chain gBLOCk sequence
  source 1..815: mol_type = other DNA
agctggctaggtaagcttggtaccgagctcggatccacgccaccatggagacagacacactcctgctatgggtactgctgctctgggttccaggttccactggtgacgacatcgtgatgacccagtctccagactccctggctgtgtctctgggcgagagggccaccatcaactgcagggccagcaagagtgttagcaccagcggctacagctacatgcactggtaccagcagaaaccaggacagcctcctaagctgctcatttacctggtgtctaacctggaatccggggtccctgaccgattcagtggcagcgggtctgggacagatttcactctcaccatcagcagcctgcaggctgaagatgtggcagtttattactgtcaacacattcgggaactgaccaggagtgaattcggcggagggaccaaggtggagatcaaacgaactacggtggctgcaccatctgtcttcatcttcccgccatctgatgagcagttgaaatctggaactgcctctgttgtgtgcctgctgaataacttctatcccagagaggccaaagtacagtggaaggtggataacgccctccaatcgggtaactcccaggagagtgtcacagagcaggacagcaaggacagcacctacagcctcagcagcaccctgacgctgagcaaagcagactacgagaaacacaaagtctacgcctgcgaagtcacccatcagggcctgagctcgcccgtcacaaagagcttcaacaggggagagtgttagtaagtttaaacccgctgatcagcctcgactgtgccttctagttgc

SEQ ID NO: 584 - DNA, 942 bp, synthetic construct
  misc_feature 1..942: note = CAR-T E6 CD8 sequence
  source 1..942: mol_type = other DNA
gaggtccagctggttgagagtggcggtgggctggttaagcctggcggctccctgcggctgagctgcgccgcgagtggatttactttcagccgatatgggatgagttgggtgcggcaagctcccgggaagaggctggaatgggtctcaacaatctccggggggggcacttacatctattaccccgactcagtcaaggggagatttaccatttcacgagacaacgctaagaataccctgtatttgcagatgaattctctgagagcagaggacacagctgtttactattgtacccgcgacaactatggcaggaactacgactacggtatggactattggggacaagggacattggttacagtgagcagtggcggcgggggcagcggaggaggaggcagcggtggggggggcagcgagatagtgctcacgcagtcacccgcgactctcagtctctcacctggggaacgagctaccctgacgtgctctgctacctcctcagtgtcatatattcactggtatcagcaacggcccgggcagtcccctagattgctcatttatagtacctctaatctggcctcaggtatccctgcacgattttctggatctggttcaggttctgattacaccctcactatctctagcctggagcctgaagactttgccgtttattactgccagcagaggtctagctccccattcacctttgggagtgggaccaaggttgaaattaaaacgacaaccccggcccccagaccaccaacgccagcccccaccatcgccagccaacccctgtctctgagaccagaagcctgtaggcctgccgccggtggagctgtgcacacaagaggactggatttcgcctgtgatatctacatttgggccccgctcgcaggcacatgtggagtgctcctcctctccctggtgattaccctgtactgctgataa

SEQ ID NO: 585 - protein, 312 aa, synthetic construct
  REGION 1..312: note = CAR-T E6 CD8 sequence
EVQLVESGGGLVKPGGSLRLSCAASGFTFSRYGMSWVRQAPGKRLEWVSTISGGGTYIYYPDSVKGRFTISRDNAKNTLYLQMNSLRAEDTAVYYCTRDNYGRNYDYGMDYWGQGTLVTVSSGGGGSGGGGSGGGGSEIVLTQSPATLSLSPGERATLTCSATSSVSYIHWYQQRPGQSPRLLIYSTSNLASGIPARFSGSGSGSDYTLTISSLEPEDFAVYYCQQRSSSPFTFGSGTKVEIKTTTPAPRPPTPAPTIASQPLSLRPEACRPAAGGAVHTRGLDFACDIYIWAPLAGTCGVLLLSLVITLYC

SEQ ID NO: 586 - DNA, 960 bp, synthetic construct
  misc_feature 1..960: note = CAR-T C2 CD8 sequence
  source 1..960: mol_type = other DNA
gaagtgcagctcgtagagagtggcgggggactggtgaagcccggtggaagcctcagactcagttgcgccgcctcaggtttcactttttcaggttacgccatgtcctgggtaagacaggcaccggggaaaggactcgagtgggtgtctactatcagctcaggaggcacttatatatattatcctgactctgtaaaaggccgatttacgatttctcgcgacaatgcaaagaactccctctacctccaaatgaacagtcttagggcagaagacactgctgtatactattgtgcacgcctcggcggcgacaactactacgagtactttgacgtgtgggggaaagggactaccgtgacagtttcaagcggaggaggtggctcaggtggaggcgggtcaggggggggaggaagtgatattgtgctcacacaatccccagcctccctggctgtgtctcccggccaacgcgctacaattacatgtcgggcctccaaaagcgtgagcaccagcggctacagctacatgcactggtatcaacagaaaccaggacaaccccccaaactgttgatttatctcgcttcaaacttggagtccggcgtgcctgcgcgcttttcagggagtgggagcggcacagattttacgctgactatcaaccccgtagaagcaaacgatacagcgaattattattgtcaacattcccgggaactcccctttacgttcggcgggggcacaaaggtcgaaattaagagaaccacgacaaccccggcccccagaccaccaacgccagcccccaccatcgccagccaacccctgtctctgagaccagaagcctgtaggcctgccgccggtggagctgtgcacacaagaggactggatttcgcctgtgatatctacatttgggccccgctcgcaggcacatgtggagtgctcctcctctccctggtgattaccctgtactgctgataa

SEQ ID NO: 587 - protein, 318 aa, synthetic construct
  REGION 1..318: note = CAR-T C2 CD8 sequence
EVQLVESGGGLVKPGGSLRLSCAASGFTFSGYAMSWVRQAPGKGLEWVSTISSGGTYIYYPDSVKGRFTISRDNAKNSLYLQMNSLRAEDTAVYYCARLGGDNYYEYFDVWGKGTTVTVSSGGGGSGGGGSGGGGSDIVLTQSPASLAVSPGQRATITCRASKSVSTSGYSYMHWYQQKPGQPPKLLIYLASNLESGVPARFSGSGSGTDFTLTINPVEANDTANYYCQHSRELPFTFGGGTKVEIKRTTTTPAPRPPTPAPTIASQPLSLRPEACRPAAGGAVHTRGLDFACDIYIWAPLAGTCGVLLLSLVITLYC

SEQ ID NO: 588 - DNA, 339 bp, synthetic construct
  misc_feature 1..339: note = CD8/4-1BB sequence
  source 1..339: mol_type = other DNA
acgacaaccccggcccccagaccaccaacgccagcccccaccatcgccagccaacccctgtctctgagaccagaagcctgtaggcctgccgccggtggagctgtgcacacaagaggactggatttcgcctgtgatatctacatttgggccccgctcgcaggcacatgtggagtgctcctcctctccctggtgattaccctgtactgcaaaaggggccgcaaaaaactcctttacatttttaagcagccttttatgaggccagtacagacgactcaagaggaagacgggtgctcatgccgctttcctgaggaggaggaaggagggtgcgaactgtgataa

SEQ ID NO: 589 - protein, 111 aa, synthetic construct
  REGION 1..111: note = CD8/4-1BB sequence
TTTPAPRPPTPAPTIASQPLSLRPEACRPAAGGAVHTRGLDFACDIYIWAPLAGTCGVLLLSLVITLYCKRGRKKLLYIFKQPFMRPVQTTQEEDGCSCRFPEEEEGGCEL

SEQ ID NO: 590 - DNA, 336 bp, synthetic construct
  misc_feature 1..336: note = CD8/CD28 sequence
  source 1..336: mol_type = other DNA
acgacaaccccggcccccagaccaccaacgccagcccccaccatcgccagccaacccctgtctctgagaccagaagcctgtaggcctgccgccggtggagctgtgcacacaagaggactggatttcgcctgtgatatctacatttgggccccgctcgcaggcacatgtggagtgctcctcctctccctggtgattaccctgtactgcagaagcaagcggtctcggctcctgcattctgattacatgaacatgaccccaagaagaccaggccccaccaggaaacattaccagccctacgctccgccacgcgacttcgctgcctaccggtcctgataa

SEQ ID NO: 591 - protein, 110 aa, synthetic construct
  REGION 1..110: note = CD8/CD28 sequence
TTTPAPRPPTPAPTIASQPLSLRPEACRPAAGGAVHTRGLDFACDIYIWAPLAGTCGVLLLSLVITLYCRSKRSRLLHSDYMNMTPRRPGPTRKHYQPYAPPRDFAAYRS

SEQ ID NO: 592 - DNA, 549 bp, synthetic construct
  misc_feature 1..549: note = CD8/CD3z sequence
  source 1..549: mol_type = other DNA
acgacaaccccggcccccagaccaccaacgccagcccccaccatcgccagccaacccctgtctctgagaccagaagcctgtaggcctgccgccggtggagctgtgcacacaagaggactggatttcgcctgtgatatctacatttgggccccgctcgcaggcacatgtggagtgctcctcctctccctggtgattaccctgtactgccgcgttaagttctcccgatcagccgacgcgcctgcttacaagcagggccagaaccaactgtacaacgagctgaatctcggtagacgggaagagtacgacgtgttggacaaacggagaggccgcgacccagaaatgggcggcaagcctcgcaggaaaaacccccaggagggactgtacaatgagttgcagaaagataagatggcagaagcttatagcgagatcggaatgaagggggaaaggagacgagggaaaggacacgacggcctttatcagggcctgtccacagcaacaaaagatacgtatgacgccctccatatgcaggcacttccaccacggtgataa

SEQ ID NO: 593 - protein, 181 aa, synthetic construct
  REGION 1..181: note = CD8/CD3z sequence
TTTPAPRPPTPAPTIASQPLSLRPEACRPAAGGAVHTRGLDFACDIYIWAPLAGTCGVLLLSLVITLYCRVKFSRSADAPAYKQGQNQLYNELNLGRREEYDVLDKRRGRDPEMGGKPRRKNPQEGLYNELQKDKMAEAYSEIGMKGERRRGKGHDGLYQGLSTATKDTYDALHMQALPPR

SEQ ID NO: 594 - DNA, 672 bp, synthetic construct
  misc_feature 1..672: note = CD8/CD28/CD3z sequence
  source 1..672: mol_type = other DNA
acgacaaccccggcccccagaccaccaacgccagcccccaccatcgccagccaacccctgtctctgagaccagaagcctgtaggcctgccgccggtggagctgtgcacacaagaggactggatttcgcctgtgatatctacatttgggccccgctcgcaggcacatgtggagtgctcctcctctccctggtgattaccctgtactgcagaagcaagcggtctcggctcctgcattctgattacatgaacatgaccccaagaagaccaggccccaccaggaaacattaccagccctacgctccgccacgcgacttcgctgcctaccggtcccgcgttaagttctcccgatcagccgacgcgcctgcttacaagcagggccagaaccaactgtacaacgagctgaatctcggtagacgggaagagtacgacgtgttggacaaacggagaggccgcgacccagaaatgggcggcaagcctcgcaggaaaaacccccaggagggactgtacaatgagttgcagaaagataagatggcagaagcttatagcgagatcggaatgaagggggaaaggagacgagggaaaggacacgacggcctttatcagggcctgtccacagcaacaaaagatacgtatgacgccctccatatgcaggcacttccaccacggtgataa

SEQ ID NO: 595 - protein, 222 aa, synthetic construct
  REGION 1..222: note = CD8/CD28/CD3z sequence
TTTPAPRPPTPAPTIASQPLSLRPEACRPAAGGAVHTRGLDFACDIYIWAPLAGTCGVLLLSLVITLYCRSKRSRLLHSDYMNMTPRRPGPTRKHYQPYAPPRDFAAYRSRVKFSRSADAPAYKQGQNQLYNELNLGRREEYDVLDKRRGRDPEMGGKPRRKNPQEGLYNELQKDKMAEAYSEIGMKGERRRGKGHDGLYQGLSTATKDTYDALHMQALPPR

SEQ ID NO: 596 - DNA, 675 bp, synthetic construct
  misc_feature 1..675: note = CD8/4-1BB/CD3z sequence
  source 1..675: mol_type = other DNA
acgacaaccccggcccccagaccaccaacgccagcccccaccatcgccagccaacccctgtctctgagaccagaagcctgtaggcctgccgccggtggagctgtgcacacaagaggactggatttcgcctgtgatatctacatttgggccccgctcgcaggcacatgtggagtgctcctcctctccctggtgattaccctgtactgcaaaaggggccgcaaaaaactcctttacatttttaagcagccttttatgaggccagtacagacgactcaagaggaagacgggtgctcatgccgctttcctgaggaggaggaaggagggtgcgaactgcgcgttaagttctcccgatcagccgacgcgcctgcttacaagcagggccagaaccaactgtacaacgagctgaatctcggtagacgggaagagtacgacgtgttggacaaacggagaggccgcgacccagaaatgggcggcaagcctcgcaggaaaaacccccaggagggactgtacaatgagttgcagaaagataagatggcagaagcttatagcgagatcggaatgaagggggaaaggagacgagggaaaggacacgacggcctttatcagggcctgtccacagcaacaaaagatacgtatgacgccctccatatgcaggcacttccaccacggtgataa

SEQ ID NO: 597 - protein, 223 aa, synthetic construct
  REGION 1..223: note = CD8/4-1BB/CD3z sequence
TTTPAPRPPTPAPTIASQPLSLRPEACRPAAGGAVHTRGLDFACDIYIWAPLAGTCGVLLLSLVITLYCKRGRKKLLYIFKQPFMRPVQTTQEEDGCSCRFPEEEEGGCELRVKFSRSADAPAYKQGQNQLYNELNLGRREEYDVLDKRRGRDPEMGGKPRRKNPQEGLYNELQKDKMAEAYSEIGMKGERRRGKGHDGLYQGLSTATKDTYDALHMQALPPR

SEQ ID NO: 598 - DNA, 798 bp, synthetic construct
  misc_feature 1..798: note = CD8/CD28/4-1BB/CD3z sequence
  source 1..798: mol_type = other DNA
acgacaaccccggcccccagaccaccaacgccagcccccaccatcgccagccaacccctgtctctgagaccagaagcctgtaggcctgccgccggtggagctgtgcacacaagaggactggatttcgcctgtgatatctacatttgggccccgctcgcaggcacatgtggagtgctcctcctctccctggtgattaccctgtactgcagaagcaagcggtctcggctcctgcattctgattacatgaacatgaccccaagaagaccaggccccaccaggaaacattaccagccctacgctccgccacgcgacttcgctgcctaccggtccaaaaggggccgcaaaaaactcctttacatttttaagcagccttttatgaggccagtacagacgactcaagaggaagacgggtgctcatgccgctttcctgaggaggaggaaggagggtgcgaactgcgcgttaagttctcccgatcagccgacgcgcctgcttacaagcagggccagaaccaactgtacaacgagctgaatctcggtagacgggaagagtacgacgtgttggacaaacggagaggccgcgacccagaaatgggcggcaagcctcgcaggaaaaacccccaggagggactgtacaatgagttgcagaaagataagatggcagaagcttatagcgagatcggaatgaagggggaaaggagacgagggaaaggacacgacggcctttatcagggcctgtccacagcaacaaaagatacgtatgacgccctccatatgcaggcacttccaccacggtgataa

SEQ ID NO: 599 - protein, 264 aa, synthetic construct
  REGION 1..264: note = CD8/CD28/4-1BB/CD3z sequence
TTTPAPRPPTPAPTIASQPLSLRPEACRPAAGGAVHTRGLDFACDIYIWAPLAGTCGVLLLSLVITLYCRSKRSRLLHSDYMNMTPRRPGPTRKHYQPYAPPRDFAAYRSKRGRKKLLYIFKQPFMRPVQTTQEEDGCSCRFPEEEEGGCELRVKFSRSADAPAYKQGQNQLYNELNLGRREEYDVLDKRRGRDPEMGGKPRRKNPQEGLYNELQKDKMAEAYSEIGMKGERRRGKGHDGLYQGLSTATKDTYDALHMQALPPR

SEQ ID NO: 600 - DNA, 1482 bp, synthetic construct
  misc_feature 1..1482: note = CAR-T C3 4-1BB/CD3z sequence
  source 1..1482: mol_type = other DNA
atggccctgcccgtgaccgctttgctgctccccctggcgctgctgctgcacgccgccaggccacaggttcagctggtgcagtctggagctgaggtgaagaagcctggggcctcagtgaaggtctcctgcaaggcttctggttacacctttaccgactacgccatgaactgggtgcgacaggcccctggacaagggcttgagtggatgggagtgatcagcaccttcagcggtaacacaaacttcaaccagaagttcaagggcagagtcaccatgaccacagacacatccacgagcacagcctacatggagctgaggagcctgagatctgacgacacggccgtgtattactgtgcgagaagcgactactacggcccatacttcgactactggggccagggcaccaccctgaccgtgtccagcggcggtggcggatccggcggtggcggatccggcggtggcggatccgatattgtgatgacccagactccactctctctgtccgtcacccctggacagccggcctccatctcctgcaggtctagtcagaccattgtccatagtaatggaaacacctatttggagtggtacctgcagaagccaggccagtctccacagctcctgatctataaggtttccaaccggttctctggagtgccagataggttcagtggcagcgggtcagggacagatttcacactgaaaatcagccgggtggaggctgaggatgttggggtttattactgcttccaaggtagccacgtgcctttcaccttcggcggagggaccaaggtggagatcaaacgaactacgacaaccccggcccccagaccaccaacgccagcccccaccatcgccagccaacccctgtctctgagaccagaagcctgtaggcctgccgccggtggagctgtgcacacaagaggactggatttcgcctgtgatatctacatttgggccccgctcgcaggcacatgtggagtgctcctcctctccctggtgattaccctgtactgcaaaaggggccgcaaaaaactcctttacatttttaagcagccttttatgaggccagtacagacgactcaagaggaagacgggtgctcatgccgctttcctgaggaggaggaaggagggtgcgaactgcgcgttaagttctcccgatcagccgacgcgcctgcttacaagcagggccagaaccaactgtacaacgagctgaatctcggtagacgggaagagtacgacgtgttggacaaacggagaggccgcgacccagaaatgggcggcaagcctcgcaggaaaaacccccaggagggactgtacaatgagttgcagaaagataagatggcagaagcttatagcgagatcggaatgaagggggaaaggagacgagggaaaggacacgacggcctttatcagggcctgtccacagcaacaaaagatacgtatgacgccctccatatgcaggcacttccaccacggtgataa

SEQ ID NO: 601 - protein, 471 aa, synthetic construct
  REGION 1..471: note = CAR-T C3 4-1BB/CD3z sequence
QVQLVQSGAEVKKPGASVKVSCKASGYTFTDYAMNWVRQAPGQGLEWMGVISTFSGNTNFNQKFKGRVTMTTDTSTSTAYMELRSLRSDDTAVYYCARSDYYGPYFDYWGQGTTLTVSSGGGGSGGGGSGGGGSDIVMTQTPLSLSVTPGQPASISCRSSQTIVHSNGNTYLEWYLQKPGQSPQLLIYKVSNRFSGVPDRFSGSGSGTDFTLKISRVEAEDVGVYYCFQGSHVPFTFGGGTKVEIKRTTTTPAPRPPTPAPTIASQPLSLRPEACRPAAGGAVHTRGLDFACDIYIWAPLAGTCGVLLLSLVITLYCKRGRKKLLYIFKQPFMRPVQTTQEEDGCSCRFPEEEEGGCELRVKFSRSADAPAYKQGQNQLYNELNLGRREEYDVLDKRRGRDPEMGGKPRRKNPQEGLYNELQKDKMAEAYSEIGMKGERRRGKGHDGLYQGLSTATKDTYDALHMQALPPR

SEQ ID NO: 602 - DNA, 567 bp, synthetic construct
  misc_feature 1..567: note = C3 CAR gBLOCK 1 sequence
  source 1..567: mol_type = other DNA
atccacgctgttttgacctccatagaagattctagagctagctgtagagcttggtaccgagggccaccatggccctgcccgtgaccgctttgctgctccccctggcgctgctgctgcacgccgccaggccacaggttcagctggtgcagtctggagctgaggtgaagaagcctggggcctcagtgaaggtctcctgcaaggcttctggttacacctttaccgactacgccatgaactgggtgcgacaggcccctggacaagggcttgagtggatgggagtgatcagcaccttcagcggtaacacaaacttcaaccagaagttcaagggcagagtcaccatgaccacagacacatccacgagcacagcctacatggagctgaggagcctgagatctgacgacacggccgtgtattactgtgcgagaagcgactactacggcccatacttcgactactggggccagggcaccaccctgaccgtgtccagcggcggtggcggatccggcggtggcggatccggcggtggcggatccgatattgtgatgacccagactccactctctctgt

SEQ ID NO: 603 - DNA, 509 bp, synthetic construct
  misc_feature 1..509: note = C3 CAR gBLOCK 2 sequence
  source 1..509: mol_type = other DNA
tattgtgatgacccagactccactctctctgtccgtcacccctggacagccggcctccatctcctgcaggtctagtcagaccattgtccatagtaatggaaacacctatttggagtggtacctgcagaagccaggccagtctccacagctcctgatctataaggtttccaaccggttctctggagtgccagataggttcagtggcagcgggtcagggacagatttcacactgaaaatcagccgggtggaggctgaggatgttggggtttattactgcttccaaggtagccacgtgcctttcaccttcggcggagggaccaaggtggagatcaaacgaactacgacaaccccggcccccagaccaccaacgccagcccccaccatcgccagccaacccctgtctctgagaccagaagcctgtaggcctgccgccggtggagctgtgcacacaagaggactggatttcgcctgtgatatctacatttgggccccgctcgcaggcacatgtg

SEQ ID NO: 604 - DNA, 455 bp, synthetic construct
  misc_feature 1..455: note = E6 scFV gBLOCK 1 sequence
  source 1..455: mol_type = other DNA
tgctctgggttccaggttccactggtgacgcggcccagccggccgaggtgcagctggtggagtctgggggaggcctggtcaagcctggggggtccctgagactctcctgtgcagcctctggattcaccttcagtaggtatggcatgagctgggtccgccaggctccagggaagaggctggagtgggtctcaaccattagtggcggaggcacctacatatactacccagactcagtgaagggccgattcaccatctccagagacaacgccaagaacaccctgtatctgcaaatgaacagcctgagagccgaggacacggctgtgtattactgtaccagagataactatggccgcaactatgattatggcatggattattggggccagggcaccctggtgaccgtgagcagcggcggtggcggatccggcggtggcggatccggcggtggcggatcc

SEQ ID NO: 605 - DNA, 432 bp, synthetic construct
  misc_feature 1..432: note = E6 scFV gBLOCK 2 sequence
  source 1..432: mol_type = other DNA
ggcggtggcggatccggcggtggcggatccggcggtggcggatccgaaattgtgttgacacagtctccagccaccctgtctttgtctccaggggaaagagccaccctcacctgcagcgccaccagcagtgttagctacatccactggtaccaacagaggcctggccagagccccaggctcctcatctatagcacctccaacctggccagcggcatcccagccaggttcagtggcagtgggtctgggagcgactacactctcaccatcagcagcctagagcctgaagattttgcagtttattactgtcagcagcgtagcagctcccctttcacctttggcagcggcaccaaagtggaaattaaaaccggtcatcatcaccatcaccactgataagtttaaacccgctgatcagcctcgactgtgccttctagt

SEQ ID NO: 606 - DNA, 1359 bp, synthetic construct
  misc_feature 1..1359: note = CAR-T C2 CD3z sequence
  source 1..1359: mol_type = other DNA
atggccttgccagtgacggccctgctgctgccattggctcttctgttgcacgctgccaggcctgaagtgcagctcgtagagagtggcgggggactggtgaagcccggtggaagcctcagactcagttgcgccgcctcaggtttcactttttcaggttacgccatgtcctgggtaagacaggcaccggggaaaggactcgagtgggtgtctactatcagctcaggaggcacttatatatattatcctgactctgtaaaaggccgatttacgatttctcgcgacaatgcaaagaactccctctacctccaaatgaacagtcttagggcagaagacactgctgtatactattgtgcacgcctcggcggcgacaactactacgagtactttgacgtgtgggggaaagggactaccgtgacagtttcaagcggaggaggtggctcaggtggaggcgggtcaggggggggaggaagtgatattgtgctcacacaatccccagcctccctggctgtgtctcccggccaacgcgctacaattacatgtcgggcctccaaaagcgtgagcaccagcggctacagctacatgcactggtatcaacagaaaccaggacaaccccccaaactgttgatttatctcgcttcaaacttggagtccggcgtgcctgcgcgcttttcagggagtgggagcggcacagattttacgctgactatcaaccccgtagaagcaaacgatacagcgaattattattgtcaacattcccgggaactcccctttacgttcggcgggggcacaaaggtcgaaattaagagaaccacgacaaccccggcccccagaccaccaacgccagcccccaccatcgccagccaacccctgtctctgagaccagaagcctgtaggcctgccgccggtggagctgtgcacacaagaggactggatttcgcctgtgatatctacatttgggccccgctcgcaggcacatgtggagtgctcctcctctccctggtgattaccctgtactgccgcgttaagttctcccgatcagccgacgcgcctgcttacaagcagggccagaaccaactgtacaacgagctgaatctcggtagacgggaagagtacgacgtgttggacaaacggagaggccgcgacccagaaatgggcggcaagcctcgcaggaaaaacccccaggagggactgtacaatgagttgcagaaagataagatggcagaagcttatagcgagatcggaatgaagggggaaaggagacgagggaaaggacacgacggcctttatcagggcctgtccacagcaacaaaagatacgtatgacgccctccatatgcaggcacttccaccacggtgataa

SEQ ID NO: 607 - protein, 451 aa, synthetic construct
  REGION 1..451: note = CAR-T C2 CD3z sequence
MALPVTALLLPLALLLHAARPEVQLVESGGGLVKPGGSLRLSCAASGFTFSGYAMSWVRQAPGKGLEWVSTISSGGTYIYYPDSVKGRFTISRDNAKNSLYLQMNSLRAEDTAVYYCARLGGDNYYEYFDVWGKGTTVTVSSGGGGSGGGGSGGGGSDIVLTQSPASLAVSPGQRATITCRASKSVSTSGYSYMHWYQQKPGQPPKLLIYLASNLESGVPARFSGSGSGTDFTLTINPVEANDTANYYCQHSRELPFTFGGGTKVEIKRTTTTPAPRPPTPAPTIASQPLSLRPEACRPAAGGAVHTRGLDFACDIYIWAPLAGTCGVLLLSLVITLYCRVKFSRSADAPAYKQGQNQLYNELNLGRREEYDVLDKRRGRDPEMGGKPRRKNPQEGLYNELQKDKMAEAYSEIGMKGERRRGKGHDGLYQGLSTATKDTYDALHMQALPPR

SEQ ID NO: 608 - DNA, 1482 bp, synthetic construct
  misc_feature 1..1482: note = CAR-T C2 CD28/CD3z sequence
  source 1..1482: mol_type = other DNA
atggccttgccagtgacggccctgctgctgccattggctcttctgttgcacgctgccaggcctgaagtgcagctcgtagagagtggcgggggactggtgaagcccggtggaagcctcagactcagttgcgccgcctcaggtttcactttttcaggttacgccatgtcctgggtaagacaggcaccggggaaaggactcgagtgggtgtctactatcagctcaggaggcacttatatatattatcctgactctgtaaaaggccgatttacgatttctcgcgacaatgcaaagaactccctctacctccaaatgaacagtcttagggcagaagacactgctgtatactattgtgcacgcctcggcggcgacaactactacgagtactttgacgtgtgggggaaagggactaccgtgacagtttcaagcggaggaggtggctcaggtggaggcgggtcaggggggggaggaagtgatattgtgctcacacaatccccagcctccctggctgtgtctcccggccaacgcgctacaattacatgtcgggcctccaaaagcgtgagcaccagcggctacagctacatgcactggtatcaacagaaaccaggacaaccccccaaactgttgatttatctcgcttcaaacttggagtccggcgtgcctgcgcgcttttcagggagtgggagcggcacagattttacgctgactatcaaccccgtagaagcaaacgatacagcgaattattattgtcaacattcccgggaactcccctttacgttcggcgggggcacaaaggtcgaaattaagagaaccacgacaaccccggcccccagaccaccaacgccagcccccaccatcgccagccaacccctgtctctgagaccagaagcctgtaggcctgccgccggtggagctgtgcacacaagaggactggatttcgcctgtgatatctacatttgggccccgctcgcaggcacatgtggagtgctcctcctctccctggtgattaccctgtactgcagaagcaagcggtctcggctcctgcattctgattacatgaacatgaccccaagaagaccaggccccaccaggaaacattaccagccctacgctccgccacgcgacttcgctgcctaccggtcccgcgttaagttctcccgatcagccgacgcgcctgcttacaagcagggccagaaccaactgtacaacgagctgaatctcggtagacgggaagagtacgacgtgttggacaaacggagaggccgcgacccagaaatgggcggcaagcctcgcaggaaaaacccccaggagggactgtacaatgagttgcagaaagataagatggcagaagcttatagcgagatcggaatgaagggggaaaggagacgagggaaaggacacgacggcctttatcagggcctgtccacagcaacaaaagatacgtatgacgccctccatatgcaggcacttccaccacggtgataa

SEQ ID NO: 609 - protein, 492 aa, synthetic construct
  REGION 1..492: note = CAR-T C2 CD28/CD3z sequence
MALPVTALLLPLALLLHAARPEVQLVESGGGLVKPGGSLRLSCAASGFTFSGYAMSWVRQAPGKGLEWVSTISSGGTYIYYPDSVKGRFTISRDNAKNSLYLQMNSLRAEDTAVYYCARLGGDNYYEYFDVWGKGTTVTVSSGGGGSGGGGSGGGGSDIVLTQSPASLAVSPGQRATITCRASKSVSTSGYSYMHWYQQKPGQPPKLLIYLASNLESGVPARFSGSGSGTDFTLTINPVEANDTANYYCQHSRELPFTFGGGTKVEIKRTTTTPAPRPPTPAPTIASQPLSLRPEACRPAAGGAVHTRGLDFACDIYIWAPLAGTCGVLLLSLVITLYCRSKRSRLLHSDYMNMTPRRPGPTRKHYQPYAPPRDFAAYRSRVKFSRSADAPAYKQGQNQLYNELNLGRREEYDVLDKRRGRDPEMGGKPRRKNPQEGLYNELQKDKMAEAYSEIGMKGERRRGKGHDGLYQGLSTATKDTYDALHMQALPPR

SEQ ID NO: 610 - DNA, 1485 bp, synthetic construct
  misc_feature 1..1485: note = CAR-T C2 4-1BB/CD3z sequence
  source 1..1485: mol_type = other DNA
atggccttgccagtgacggccctgctgctgccattggctcttctgttgcacgctgccaggcctgaagtgcagctcgtagagagtggcgggggactggtgaagcccggtggaagcctcagactcagttgcgccgcctcaggtttcactttttcaggttacgccatgtcctgggtaagacaggcaccggggaaaggactcgagtgggtgtctactatcagctcaggaggcacttatatatattatcctgactctgtaaaaggccgatttacgatttctcgcgacaatgcaaagaactccctctacctccaaatgaacagtcttagggcagaagacactgctgtatactattgtgcacgcctcggcggcgacaactactacgagtactttgacgtgtgggggaaagggactaccgtgacagtttcaagcggaggaggtggctcaggtggaggcgggtcaggggggggaggaagtgatattgtgctcacacaatccccagcctccctggctgtgtctcccggccaacgcgctacaattacatgtcgggcctccaaaagcgtgagcaccagcggctacagctacatgcactggtatcaacagaaaccaggacaaccccccaaactgttgatttatctcgcttcaaacttggagtccggcgtgcctgcgcgcttttcagggagtgggagcggcacagattttacgctgactatcaaccccgtagaagcaaacgatacagcgaattattattgtcaacattcccgggaactcccctttacgttcggcgggggcacaaaggtcgaaattaagagaaccacgacaaccccggcccccagaccaccaacgccagcccccaccatcgccagccaacccctgtctctgagaccagaagcctgtaggcctgccgccggtggagctgtgcacacaagaggactggatttcgcctgtgatatctacatttgggccccgctcgcaggcacatgtggagtgctcctcctctccctggtgattaccctgtactgcaaaaggggccgcaaaaaactcctttacatttttaagcagccttttatgaggccagtacagacgactcaagaggaagacgggtgctcatgccgctttcctgaggaggaggaaggagggtgcgaactgcgcgttaagttctcccgatcagccgacgcgcctgcttacaagcagggccagaaccaactgtacaacgagctgaatctcggtagacgggaagagtacgacgtgttggacaaacggagaggccgcgacccagaaatgggcggcaagcctcgcaggaaaaacccccaggagggactgtacaatgagttgcagaaagataagatggcagaagcttatagcgagatcggaatgaagggggaaaggagacgagggaaaggacacgacggcctttatcagggcctgtccacagcaacaaaagatacgtatgacgccctccatatgcaggcacttccaccacggtgataa

SEQ ID NO: 611 - protein, 493 aa, synthetic construct
  REGION 1..493: note = CAR-T C2 4-1BB/CD3z sequence
MALPVTALLLPLALLLHAARPEVQLVESGGGLVKPGGSLRLSCAASGFTFSGYAMSWVRQAPGKGLEWVSTISSGGTYIYYPDSVKGRFTISRDNAKNSLYLQMNSLRAEDTAVYYCARLGGDNYYEYFDVWGKGTTVTVSSGGGGSGGGGSGGGGSDIVLTQSPASLAVSPGQRATITCRASKSVSTSGYSYMHWYQQKPGQPPKLLIYLASNLESGVPARFSGSGSGTDFTLTINPVEANDTANYYCQHSRELPFTFGGGTKVEIKRTTTTPAPRPPTPAPTIASQPLSLRPEACRPAAGGAVHTRGLDFACDIYIWAPLAGTCGVLLLSLVITLYCKRGRKKLLYIFKQPFMRPVQTTQEEDGCSCRFPEEEEGGCELRVKFSRSADAPAYKQGQNQLYNELNLGRREEYDVLDKRRGRDPEMGGKPRRKNPQEGLYNELQKDKMAEAYSEIGMKGERRRGKGHDGLYQGLSTATKDTYDALHMQALPPR

SEQ ID NO: 612 - DNA, 1470 bp, synthetic construct
  misc_feature 1..1470: note = CAR-T C2 OX40/CD3z sequence
  source 1..1470: mol_type = other DNA
atggccttgccagtgacggccctgctgctgccattggctcttctgttgcacgctgccaggcctgaagtgcagctcgtagagagtggcgggggactggtgaagcccggtggaagcctcagactcagttgcgccgcctcaggtttcactttttcaggttacgccatgtcctgggtaagacaggcaccggggaaaggactcgagtgggtgtctactatcagctcaggaggcacttatatatattatcctgactctgtaaaaggccgatttacgatttctcgcgacaatgcaaagaactccctctacctccaaatgaacagtcttagggcagaagacactgctgtatactattgtgcacgcctcggcggcgacaactactacgagtactttgacgtgtgggggaaagggactaccgtgacagtttcaagcggaggaggtggctcaggtggaggcgggtcaggggggggaggaagtgatattgtgctcacacaatccccagcctccctggctgtgtctcccggccaacgcgctacaattacatgtcgggcctccaaaagcgtgagcaccagcggctacagctacatgcactggtatcaacagaaaccaggacaaccccccaaactgttgatttatctcgcttcaaacttggagtccggcgtgcctgcgcgcttttcagggagtgggagcggcacagattttacgctgactatcaaccccgtagaagcaaacgatacagcgaattattattgtcaacattcccgggaactcccctttacgttcggcgggggcacaaaggtcgaaattaagagaaccacgacaaccccggcccccagaccaccaacgccagcccccaccatcgccagccaacccctgtctctgagaccagaagcctgtaggcctgccgccggtggagctgtgcacacaagaggactggatttcgcctgtgatatctacatttgggccccgctcgcaggcacatgtggagtgctcctcctctccctggtgattaccctgtactgccggagggaccagaggctgccccccgatgcccacaagccccctgggggaggcagtttccggacccccatccaagaggagcaggccgacgcccactccaccctggccaagatccgcgttaagttctcccgatcagccgacgcgcctgcttacaagcagggccagaaccaactgtacaacgagctgaatctcggtagacgggaagagtacgacgtgttggacaaacggagaggccgcgacccagaaatgggcggcaagcctcgcaggaaaaacccccaggagggactgtacaatgagttgcagaaagataagatggcagaagcttatagcgagatcggaatgaagggggaaaggagacgagggaaaggacacgacggcctttatcagggcctgtccacagcaacaaaagatacgtatgacgccctccatatgcaggcacttccaccacggtgataa

SEQ ID NO: 613 - protein, 488 aa, synthetic construct
  REGION 1..488: note = CAR-T C2 OX40/CD3z sequence
MALPVTALLLPLALLLHAARPEVQLVESGGGLVKPGGSLRLSCAASGFTFSGYAMSWVRQAPGKGLEWVSTISSGGTYIYYPDSVKGRFTISRDNAKNSLYLQMNSLRAEDTAVYYCARLGGDNYYEYFDVWGKGTTVTVSSGGGGSGGGGSGGGGSDIVLTQSPASLAVSPGQRATITCRASKSVSTSGYSYMHWYQQKPGQPPKLLIYLASNLESGVPARFSGSGSGTDFTLTINPVEANDTANYYCQHSRELPFTFGGGTKVEIKRTTTTPAPRPPTPAPTIASQPLSLRPEACRPAAGGAVHTRGLDFACDIYIWAPLAGTCGVLLLSLVITLYCRRDQRLPPDAHKPPGGGSFRTPIQEEQADAHSTLAKIRVKFSRSADAPAYKQGQNQLYNELNLGRREEYDVLDKRRGRDPEMGGKPRRKNPQEGLYNELQKDKMAEAYSEIGMKGERRRGKGHDGLYQGLSTATKDTYDALHMQALPPR

SEQ ID NO: 614 - DNA, 1593 bp, synthetic construct
  misc_feature 1..1593: note = CAR-T C2 CD28/OX40/CD3z sequence
  source 1..1593: mol_type = other DNA
atggccttgccagtgacggccctgctgctgccattggctcttctgttgcacgctgccaggcctgaagtgcagctcgtagagagtggcgggggactggtgaagcccggtggaagcctcagactcagttgcgccgcctcaggtttcactttttcaggttacgccatgtcctgggtaagacaggcaccggggaaaggactcgagtgggtgtctactatcagctcaggaggcacttatatatattatcctgactctgtaaaaggccgatttacgatttctcgcgacaatgcaaagaactccctctacctccaaatgaacagtcttagggcagaagacactgctgtatactattgtgcacgcctcggcggcgacaactactacgagtactttgacgtgtgggggaaagggactaccgtgacagtttcaagcggaggaggtggctcaggtggaggcgggtcaggggggggaggaagtgatattgtgctcacacaatccccagcctccctggctgtgtctcccggccaacgcgctacaattacatgtcgggcctccaaaagcgtgagcaccagcggctacagctacatgcactggtatcaacagaaaccaggacaaccccccaaactgttgatttatctcgcttcaaacttggagtccggcgtgcctgcgcgcttttcagggagtgggagcggcacagattttacgctgactatcaaccccgtagaagcaaacgatacagcgaattattattgtcaacattcccgggaactcccctttacgttcggcgggggcacaaaggtcgaaattaagagaaccacgacaaccccggcccccagaccaccaacgccagcccccaccatcgccagccaacccctgtctctgagaccagaagcctgtaggcctgccgccggtggagctgtgcacacaagaggactggatttcgcctgtgatatctacatttgggccccgctcgcaggcacatgtggagtgctcctcctctccctggtgattaccctgtactgcagaagcaagcggtctcggctcctgcattctgattacatgaacatgaccccaagaagaccaggccccaccaggaaacattaccagccctacgctccgccacgcgacttcgctgcctaccggtcccggagggaccagaggctgccccccgatgcccacaagccccctgggggaggcagtttccggacccccatccaagaggagcaggccgacgcccactccaccctggccaagatccgcgttaagttctcccgatcagccgacgcgcctgcttacaagcagggccagaaccaactgtacaacgagctgaatctcggtagacgggaagagtacgacgtgttggacaaacggagaggccgcgacccagaaatgggcggcaagcctcgcaggaaaaacccccaggagggactgtacaatgagttgcagaaagataagatggcagaagcttatagcgagatcggaatgaagggggaaaggagacgagggaaaggacacgacggcctttatcagggcctgtccacagcaacaaaagatacgtatgacgccctccatatgcaggcacttccaccacggtgataa

SEQ ID NO: 615 - protein, 529 aa, synthetic construct
  REGION 1..529: note = CAR-T C2 CD28/OX40/CD3z sequence
MALPVTALLLPLALLLHAARPEVQLVESGGGLVKPGGSLRLSCAASGFTFSGYAMSWVRQAPGKGLEWVSTISSGGTYIYYPDSVKGRFTISRDNAKNSLYLQMNSLRAEDTAVYYCARLGGDNYYEYFDVWGKGTTVTVSSGGGGSGGGGSGGGGSDIVLTQSPASLAVSPGQRATITCRASKSVSTSGYSYMHWYQQKPGQPPKLLIYLASNLESGVPARFSGSGSGTDFTLTINPVEANDTANYYCQHSRELPFTFGGGTKVEIKRTTTTPAPRPPTPAPTIASQPLSLRPEACRPAAGGAVHTRGLDFACDIYIWAPLAGTCGVLLLSLVITLYCRSKRSRLLHSDYMNMTPRRPGPTRKHYQPYAPPRDFAAYRSRRDQRLPPDAHKPPGGGSFRTPIQEEQADAHSTLAKIRVKFSRSADAPAYKQGQNQLYNELNLGRREEYDVLDKRRGRDPEMGGKPRRKNPQEGLYNELQKDKMAEAYSEIGMKGERRRGKGHDGLYQGLSTATKDTYDALHMQALPPR

SEQ ID NO: 616 - DNA, 1452 bp, synthetic construct
  misc_feature 1..1452: note = CAR-T E6 OX40/CD3z sequence
  source 1..1452: mol_type = other DNA
atggccctgcccgtgaccgctttgctgctccccctggcgctgctgctgcacgccgccaggccagaggtccagctggttgagagtggcggtgggctggttaagcctggcggctccctgcggctgagctgcgccgcgagtggatttactttcagccgatatgggatgagttgggtgcggcaagctcccgggaagaggctggaatgggtctcaacaatctccggggggggcacttacatctattaccccgactcagtcaaggggagatttaccatttcacgagacaacgctaagaataccctgtatttgcagatgaattctctgagagcagaggacacagctgtttactattgtacccgcgacaactatggcaggaactacgactacggtatggactattggggacaagggacattggttacagtgagcagtggcggcgggggcagcggaggaggaggcagcggtggggggggcagcgagatagtgctcacgcagtcacccgcgactctcagtctctcacctggggaacgagctaccctgacgtgctctgctacctcctcagtgtcatatattcactggtatcagcaacggcccgggcagtcccctagattgctcatttatagtacctctaatctggcctcaggtatccctgcacgattttctggatctggttcaggttctgattacaccctcactatctctagcctggagcctgaagactttgccgtttattactgccagcagaggtctagctccccattcacctttgggagtgggaccaaggttgaaattaaaacgacaaccccggcccccagaccaccaacgccagcccccaccatcgccagccaacccctgtctctgagaccagaagcctgtaggcctgccgccggtggagctgtgcacacaagaggactggatttcgcctgtgatatctacatttgggccccgctcgcaggcacatgtggagtgctcctcctctccctggtgattaccctgtactgccggagggaccagaggctgccccccgatgcccacaagccccctgggggaggcagtttccggacccccatccaagaggagcaggccgacgcccactccaccctggccaagatccgcgttaagttctcccgatcagccgacgcgcctgcttacaagcagggccagaaccaactgtacaacgagctgaatctcggtagacgggaagagtacgacgtgttggacaaacggagaggccgcgacccagaaatgggcggcaagcctcgcaggaaaaacccccaggagggactgtacaatgagttgcagaaagataagatggcagaagcttatagcgagatcggaatgaagggggaaaggagacgagggaaaggacacgacggcctttatcagggcctgtccacagcaacaaaagatacgtatgacgccctccatatgcaggcacttccaccacggtgataa

SEQ ID NO: 617 - protein, 482 aa, synthetic construct
  REGION 1..482: note = CAR-T E6 OX40/CD3z sequence
MALPVTALLLPLALLLHAARPEVQLVESGGGLVKPGGSLRLSCAASGFTFSRYGMSWVRQAPGKRLEWVSTISGGGTYIYYPDSVKGRFTISRDNAKNTLYLQMNSLRAEDTAVYYCTRDNYGRNYDYGMDYWGQGTLVTVSSGGGGSGGGGSGGGGSEIVLTQSPATLSLSPGERATLTCSATSSVSYIHWYQQRPGQSPRLLIYSTSNLASGIPARFSGSGSGSDYTLTISSLEPEDFAVYYCQQRSSSPFTFGSGTKVEIKTTTPAPRPPTPAPTIASQPLSLRPEACRPAAGGAVHTRGLDFACDIYIWAPLAGTCGVLLLSLVITLYCRRDQRLPPDAHKPPGGGSFRTPIQEEQADAHSTLAKIRVKFSRSADAPAYKQGQNQLYNELNLGRREEYDVLDKRRGRDPEMGGKPRRKNPQEGLYNELQKDKMAEAYSEIGMKGERRRGKGHDGLYQGLSTATKDTYDALHMQALPPR

SEQ ID NO: 618 - DNA, 1575 bp, synthetic construct
  misc_feature 1..1575: note = CAR-T E6 CD28/OX40/CD3z sequence
  source 1..1575: mol_type = other DNA
atggccctgcccgtgaccgctttgctgctccccctggcgctgctgctgcacgccgccaggccagaggtccagctggttgagagtggcggtgggctggttaagcctggcggctccctgcggctgagctgcgccgcgagtggatttactttcagccgatatgggatgagttgggtgcggcaagctcccgggaagaggctggaatgggtctcaacaatctccggggggggcacttacatctattaccccgactcagtcaaggggagatttaccatttcacgagacaacgctaagaataccctgtatttgcagatgaattctctgagagcagaggacacagctgtttactattgtacccgcgacaactatggcaggaactacgactacggtatggactattggggacaagggacattggttacagtgagcagtggcggcgggggcagcggaggaggaggcagcggtggggggggcagcgagatagtgctcacgcagtcacccgcgactctcagtctctcacctggggaacgagctaccctgacgtgctctgctacctcctcagtgtcatatattcactggtatcagcaacggcccgggcagtcccctagattgctcatttatagtacctctaatctggcctcaggtatccctgcacgattttctggatctggttcaggttctgattacaccctcactatctctagcctggagcctgaagactttgccgtttattactgccagcagaggtctagctccccattcacctttgggagtgggaccaaggttgaaattaaaacgacaaccccggcccccagaccaccaacgccagcccccaccatcgccagccaacccctgtctctgagaccagaagcctgtaggcctgccgccggtggagctgtgcacacaagaggactggatttcgcctgtgatatctacatttgggccccgctcgcaggcacatgtggagtgctcctcctctccctggtgattaccctgtactgcagaagcaagcggtctcggctcctgcattctgattacatgaacatgaccccaagaagaccaggccccaccaggaaacattaccagccctacgctccgccacgcgacttcgctgcctaccggtcccggagggaccagaggctgccccccgatgcccacaagccccctgggggaggcagtttccggacccccatccaagaggagcaggccgacgcccactccaccctggccaagatccgcgttaagttctcccgatcagccgacgcgcctgcttacaagcagggccagaaccaactgtacaacgagctgaatctcggtagacgggaagagtacgacgtgttggacaaacggagaggccgcgacccagaaatgggcggcaagcctcgcaggaaaaacccccaggagggactgtacaatgagttgcagaaagataagatggcagaagcttatagcgagatcggaatgaagggggaaaggagacgagggaaaggacacgacggcctttatcagggcctgtccacagcaacaaaagatacgtatgacgccctccatatgcaggcacttccaccacggtgataa

SEQ ID NO: 619 - protein, 523 aa, synthetic construct
  REGION 1..523: note = CAR-T E6 CD28/OX40/CD3z sequence
MALPVTALLLPLALLLHAARPEVQLVESGGGLVKPGGSLRLSCAASGFTFSRYGMSWVRQAPGKRLEWVSTISGGGTYIYYPDSVKGRFTISRDNAKNTLYLQMNSLRAEDTAVYYCTRDNYGRNYDYGMDYWGQGTLVTVSSGGGGSGGGGSGGGGSEIVLTQSPATLSLSPGERATLTCSATSSVSYIHWYQQRPGQSPRLLIYSTSNLASGIPARFSGSGSGSDYTLTISSLEPEDFAVYYCQQRSSSPFTFGSGTKVEIKTTTPAPRPPTPAPTIASQPLSLRPEACRPAAGGAVHTRGLDFACDIYIWAPLAGTCGVLLLSLVITLYCRSKRSRLLHSDYMNMTPRRPGPTRKHYQPYAPPRDFAAYRSRRDQRLPPDAHKPPGGGSFRTPIQEEQADAHSTLAKIRVKFSRSADAPAYKQGQNQLYNELNLGRREEYDVLDKRRGRDPEMGGKPRRKNPQEGLYNELQKDKMAEAYSEIGMKGERRRGKGHDGLYQGLSTATKDTYDALHMQALPPR

SEQ ID NO: 620 - protein, 43 aa, synthetic construct
  REGION 1..43: note = MUC1 FRAGMENT
SNIKFRPGSVVVQLTLAFREGTINVHDVETQFNQYKTEAASRY

SEQ ID NO: 621 - protein, 35 aa, synthetic construct
  REGION 1..35: note = MUC1 FRAGMENT
SVVVQLTLAFREGTINVHDVETQFNQYKTEAASRY

SEQ ID NO: 622 - protein, 24 aa, synthetic construct
  REGION 1..24: note = Cytoplasmic MUC1 truncated segment
VQLTLAFREGTINVHDVETQFNQY

SEQ ID NO: 623 - protein, 24 aa, synthetic construct
  REGION 1..24: note = Cytoplasmic MUC1 truncated segment
SNIKFRPGSVVVQLTLAFREGTIN

SEQ ID NO: 624 - DNA, 28 bp, synthetic construct
  misc_feature 1..28: note = Primer
  source 1..28: mol_type = other DNA
attctaagcttgggccaccatggaactg

SEQ ID NO: 625 - DNA, 41 bp, synthetic construct
  misc_feature 1..41: note = Primer
  source 1..41: mol_type = other DNA
tctagagtttaaacttactatttacccggagacagggagag

SEQ ID NO: 626 - DNA, 41 bp, synthetic construct
  misc_feature 1..41: note = Primer
  source 1..41: mol_type = other DNA
agtatggcccagccggccgaggtgcagctggtggagtctgg

SEQ ID NO: 627 - DNA, 26 bp, synthetic construct
  misc_feature 1..26: note = Primer
  source 1..26: mol_type = other DNA
tagaaggcacagtcgaggctgatcag

SEQ ID NO: 628 - DNA, 27 bp, synthetic construct
  misc_feature 1..27: note = Primer
  source 1..27: mol_type = other DNA
attctaagcttgggccaccatggaagc

SEQ ID NO: 629 - DNA, 40 bp, synthetic construct
  misc_feature 1..40: note = Primer
  source 1..40: mol_type = other DNA
tctagagtttaaacttactaacactctcccctgttgaagc

SEQ ID NO: 630 - DNA, 43 bp, synthetic construct
  misc_feature 1..43: note = Primer
  source 1..43: mol_type = other DNA
agtatggcccagccggccgaaattgtgttgacacagtctccag

SEQ ID NO: 631 - DNA, 26 bp, synthetic construct
  misc_feature 1..26: note = Primer
  source 1..26: mol_type = other DNA
tagaaggcacagtcgaggctgatcag

SEQ ID NO: 632 - DNA, 33 bp, synthetic construct
  misc_feature 1..33: note = Primer
  source 1..33: mol_type = other DNA
actgtcatatggaggtgcagctggtggagtctg

SEQ ID NO: 633 - DNA, 37 bp, synthetic construct
  misc_feature 1..37: note = Primer
  source 1..37: mol_type = other DNA
actgtctcgagtttaatttccactttggtgccgctgc

SEQ ID NO: 634 - DNA, 33 bp, synthetic construct; identical to SEQ ID NO: 632
  misc_feature 1..33: note = Primer
  source 1..33: mol_type = other DNA

SEQ ID NO: 635 - DNA, 37 bp, synthetic construct
  misc_feature 1..37: note = Primer
  source 1..37: mol_type = other DNA
actgtaccggttttaatttccactttggtgccgctgc

SEQ ID NO: 636 - DNA, 29 bp, synthetic construct
  misc_feature 1..29: note = Primer
  source 1..29: mol_type = other DNA
cttcttcctcaggagcaagctcaccgtgg

SEQ ID NO: 637 - DNA, 18 bp, synthetic construct
  misc_feature 1..18: note = Primer
  source 1..18: mol_type = other DNA
gagccgtcggagtccagc

SEQ ID NO: 638 - DNA, 18 bp, synthetic construct
  misc_feature 1..18: note = Primer
  source 1..18: mol_type = other DNA
gcacctgaactcctgggg

SEQ ID NO: 639 - DNA, 22 bp, synthetic construct
  misc_feature 1..22: note = Primer
  source 1..22: mol_type = other DNA
tttaatttccactttggtgccg

SEQ ID NO: 640 - DNA, 32 bp, synthetic construct
  misc_feature 1..32: note = Primer
  source 1..32: mol_type = other DNA
cgcggctagcttaagcttggtaccgagggcca

SEQ ID NO: 641 - DNA, 36 bp, synthetic construct
  misc_feature 1..36: note = Primer
  source 1..36: mol_type = other DNA
cgcggcggccgcctgatcagcgggtttaaacttatc

SEQ ID NO: 642 - DNA, 2151 bp, synthetic construct
  misc_feature 1..2151: note = MMP9
  source 1..2151: mol_type = other DNA
atgagcctctggcagcccctggtcctggtgctcctggtgctgggctgctgctttgctgcccccagacagcgccagtccacccttgtgctcttccctggagacctgagaaccaatctcaccgacaggcagctggcagaggaatacctgtaccgctatggttacactcgggtggcagagatgcgtggagagtcgaaatctctggggcctgcgctgctgcttctccagaagcaactgtccctgcccgagaccggtgagctggatagcgccacgctgaaggccatgcgaaccccacggtgcggggtcccagacctgggcagattccaaacctttgagggcgacctcaagtggcaccaccacaacatcacctattggatccaaaactactcggaagacttgccgcgggcggtgattgacgacgcctttgcccgcgccttcgcactgtggagcgcggtgacgccgctcaccttcactcgcgtgtacagccgggacgcagacatcgtcatccagtttggtgtcgcggagcacggagacgggtatcccttcgacgggaaggacgggctcctggcacacgcctttcctcctggccccggcattcagggagacgcccatttcgacgatgacgagttgtggtccctgggcaagggcgtcgtggttccaactcggtttggaaacgcagatggcgcggcctgccacttccccttcatcttcgagggccgctcctactctgcctgcaccaccgacggtcgctccgacggcttgccctggtgcagtaccacggccaactacgacaccgacgaccggtttggcttctgccccagcgagagactctacacccaggacggcaatgctgatgggaaaccctgccagtttccattcatcttccaaggccaatcctactccgcctgcaccacggacggtcgctccgacggctaccgctggtgcgccaccaccgccaactacgaccgggacaagctcttcggcttctgcccgacccgagctgactcgacggtgatggggggcaactcggcgggggagctgtgcgtcttccccttcactttcctgggtaaggagtactcgacctgtaccagcgagggccgcggagatgggcgcctctggtgcgctaccacctcgaactttgacagcgacaagaagtggggcttctgcccggaccaaggatacagtttgttcctcgtggcggcgcatgagttcggccacgcgctgggcttagatcattcctcagtgccggaggcgctcatgtaccctatgtaccgcttcactgaggggccccccttgcataaggacgacgtgaatggcatccggcacctctatggtcctcgccctgaacctgagccacggcctccaaccaccaccacaccgcagcccacggctcccccgacggtctgccccaccggaccccccactgtccacccctcagagcgccccacagctggccccacaggtcccccctcagctggccccacaggtccccccactgctggcccttctacggccactactgtgcctttgagtccggtggacgatgcctgcaacgtgaacatcttcgacgccatcgcggagattgggaaccagctgtatttgttcaaggatgggaagtactggcgattctctgagggcagggggagccggccgcagggccccttccttatcgccgacaagtggcccgcgctgccccgcaagctggactcggtctttgaggagcggctctccaagaagcttttcttcttctctgggcgccaggtgtgggtgtacacaggcgcgtcggtgctgggcccgaggcgtctggacaagctgggcctgggagccgacgtggcccaggtgaccggggccctccggagtggcagggggaagatgctgctgttcagcgggcggcgcctctggaggttcgacgtgaaggcgcagatggtggatccccggagcgccagcgaggtggaccggatgttccccggggtgcctttggacacgcacgacgtcttccagtaccgagagaaagcctatttctgccaggaccgcttctactggcgcgtgagttcccggagtgagttgaaccaggtggaccaagtgggctacgtgacctatgacatcctgcagtgccctgaggacgattacaaggatgacgacgataagtgataa

SEQ ID NO: 643 - protein, 715 aa, synthetic construct
  REGION 1..715: note = MMP9
MSLWQPLVLVLLVLGCCFAAPRQRQSTLVLFPGDLRTNLTDRQLAEEYLYRYGYTRVAEMRGESKSLGPALLLLQKQLSLPETGELDSATLKAMRTPRCGVPDLGRFQTFEGDLKWHHHNITYWIQNYSEDLPRAVIDDAFARAFALWSAVTPLTFTRVYSRDADIVIQFGVAEHGDGYPFDGKDGLLAHAFPPGPGIQGDAHFDDDELWSLGKGVVVPTRFGNADGAACHFPFIFEGRSYSACTTDGRSDGLPWCSTTANYDTDDRFGFCPSERLYTQDGNADGKPCQFPFIFQGQSYSACTTDGRSDGYRWCATTANYDRDKLFGFCPTRADSTVMGGNSAGELCVFPFTFLGKEYSTCTSEGRGDGRLWCATTSNFDSDKKWGFCPDQGYSLFLVAAHEFGHALGLDHSSVPEALMYPMYRFTEGPPLHKDDVNGIRHLYGPRPEPEPRPPTTTTPQPTAPPTVCPTGPPTVHPSERPTAGPTGPPSAGPTGPPTAGPSTATTVPLSPVDDACNVNIFDAIAEIGNQLYLFKDGKYWRFSEGRGSRPQGPFLIADKWPALPRKLDSVFEERLSKKLFFFSGRQVWVYTGASVLGPRRLDKLGLGADVAQVTGALRSGRGKMLLFSGRRLWRFDVKAQMVDPRSASEVDRMFPGVPLDTHDVFQYREKAYFCQDRFYWRVSSRSELNQVDQVGYVTYDILQCPEDDYKDDDDK

SEQ ID NO: 644 - DNA, 1062 bp, synthetic construct
  misc_feature 1..1062: note = MMP9 catalytic domain
  source 1..1062: mol_type = other DNA
atgttccaaacctttgagggcgacctcaagtggcaccaccacaacatcacctattggatccaaaactactcggaagacttgccgcgggcggtgattgacgacgcctttgcccgcgccttcgcactgtggagcgcggtgacgccgctcaccttcactcgcgtgtacagccgggacgcagacatcgtcatccagtttggtgtcgcggagcacggagacgggtatcccttcgacgggaaggacgggctcctggcacacgcctttcctcctggccccggcattcagggagacgcccatttcgacgatgacgagttgtggtccctgggcaagggcgtcgtggttccaactcggtttggaaacgcagatggcgcggcctgccacttccccttcatcttcgagggccgctcctactctgcctgcaccaccgacggtcgctccgacggcttgccctggtgcagtaccacggccaactacgacaccgacgaccggtttggcttctgccccagcgagagactctacacccaggacggcaatgctgatgggaaaccctgccagtttccattcatcttccaaggccaatcctactccgcctgcaccacggacggtcgctccgacggctaccgctggtgcgccaccaccgccaactacgaccgggacaagctcttcggcttctgcccgacccgagctgactcgacggtgatggggggcaactcggcgggggagctgtgcgtcttccccttcactttcctgggtaaggagtactcgacctgtaccagcgagggccgcggagatgggcgcctctggtgcgctaccacctcgaactttgacagcgacaagaagtggggcttctgcccggaccaaggatacagtttgttcctcgtggcggcgcatgagttcggccacgcgctgggcttagatcattcctcagtgccggaggcgctcatgtaccctatgtaccgcttcactgaggggccccccttgcataaggacgacgtgaatggcatccggcacctctatggtcctcgccctgaacctgattacaaggatgacgacgataagtgataa

SEQ ID NO: 645 - protein, 352 aa, synthetic construct
  REGION 1..352: note = MMP9
MFQTFEGDLKWHHHNITYWIQNYSEDLPRAVIDDAFARAFALWSAVTPLTFTRVYSRDADIVIQFGVAEHGDGYPFDGKDGLLAHAFPPGPGIQGDAHFDDDELWSLGKGVVVPTRFGNADGAACHFPFIFEGRSYSACTTDGRSDGLPWCSTTANYDTDDRFGFCPSERLYTQDGNADGKPCQFPFIFQGQSYSACTTDGRSDGYRWCATTANYDRDKLFGFCPTRADSTVMGGNSAGELCVFPFTFLGKEYSTCTSEGRGDGRLWCATTSNFDSDKKWGFCPDQGYSLFLVAAHEFGHALGLDHSSVPEALMYPMYRFTEGPPLHKDDVNGIRHLYGPRPEPDYKDDDDK

SEQ ID NO: 646 - DNA, 2186 bp, synthetic construct
  misc_feature 1..2186: note = NFATc1 Promoter (NFATc1P)
  source 1..2186: mol_type = other DNA
aggcaggaggaagaggaaaggggcgcagggcgctcggggagcagagccgggggcccgcggtggccgcagaggccgggccggggcgcagaggccgggcgagctggccgcgctctgggccgccgcctccggaactccctgcgcctggcgcgcggccaccgtggtcccggcaacggcattaaacagagggaaacagacccgggattccgtcacccgggcggggggataaggacggctttgagagcagacaggaaaagggagcttttctgcatggggtgaaaaaattatttattgaaggaggaggaggcggcagcggaggaaggggaggggcgggaggaggaggaagagccggccgcccccgccccggccccggctcctcaggagccaagggcagcctcgccaggtcggtcccgggctcgaggaccgcggctggggtcgaggggctcagtctcccacgtgaccggctgggcgcgccccgccagacccggcctcgggattccctcctcccggcgagtctccgcccgccccgtcctggaggtggggagaaggagggcggggcgggggggacggaaactctccccgccaaatcctggccccaggcctggggacactcgcggcgggaagatttggaggggaggggagggggaggggcgtgggggcgcggcctcgctggagtccccctgaccccccgacccccgcccaccggcctgggcgtcctcccgcggcccctcctcccctcccggcgcccggtgctctggggcgcgtgccacgcctggctcggcgccgtaggggcccccgcaggtagagacccctggaaatggcctcgacgccgcaggagcgaggcggccaccaccccgctaatccgggcacgtctctccaggccgaggcctgcggtggaaaagccggggttccatttgtgctgagtcggggcggccgaatggagccaggcctcgggacgcgggacggacgggctctggccgcgcaccttcgcgggctctgcagcgcccgaccgcctcccccggcagggaggaggcgcttgtggggggcacccacggggcacagtgatccctgggggtctgcggacctcctgggccccgcagcagacacgagtttagcctttgggtttagtttaaatcacataagggtgtcgtgcaatcgatttatggtttctacacaccagacactttaacctccaaccccccccatccaagccaacaagaaaatgcggtgccgtgttggcagctgagctgcgcccgaagagacgcagggagacgtaagagaggaaagtgtgagtggccggggggcctccccccgtcagaagtcgcgcagtcgcgcccataaaacgccccctccgggcggctagggcaggtgagcgcgtccccgggcctccccacgccggcccctgccacagagccgtctaggtcgagcagatatttacagaataaaaatgacaataactcgacgtcccgggacggccacgcaatctgttagtaatttagcgggatgggaatttcctttctagggcctgccagtgaagcgcttttccaaatttccacagcgggggaagcctgcgattttacataatgacttcagcatgccgggctttctcgacacccctccccggcccccggcccccgccccccgccccttttccagcagggccgggctccctccggacacccgcgtggactcaggcgtcccgtctggcccgttcgcccccgtttcccccgccagccccagcgcccccctgcccggcccccggattccccgttcccgcccctacgcccccatcccctccccgtgcgcccctccccgtgcgcccccctccccgtgcgccccccctccccgtgcgcccccctccccgtgcgccccccctccccgggcgcccccctccccgggcgccccccctccccgtgcgcccccccctccccgtgcgccccccctccccgtgcgcgccccgcctcttgcgcccctgcccccaggcgagcggctgccgcggcgcggggaggggcgggcgctcggcgactcgtccccggggccccgcgcgggcccgggcagcaggggcgtgatgtcacggcagggagggggcgcgggagccgccgggccggcggggaggcgggggaggtgttttccagctttaaaaaggcaggaggcagagcgcggccctgcgtcagagcgagactcagagg

SEQ ID NO: 647 - DNA, 4349 bp, synthetic construct
  misc_feature 1..4349: note = NFATc1P-MMP9
  source 1..4349: mol_type = other DNA
aggcaggaggaagaggaaaggggcgcagggcgctcggggagcagagccgggggcccgcggtggccgcagaggccgggccggggcgcagaggccgggcgagctggccgcgctctgggccgccgcctccggaactccctgcgcctggcgcgcggccaccgtggtcccggcaacggcattaaacagagggaaacagacccgggattccgtcacccgggcggggggataaggacggctttgagagcagacaggaaaagggagcttttctgcatggggtgaaaaaattatttattgaaggaggaggaggcggcagcggaggaaggggaggggcgggaggaggaggaagagccggccgcccccgccccggccccggctcctcaggagccaagggcagcctcgccaggtcggtcccgggctcgaggaccgcggctggggtcgaggggctcagtctcccacgtgaccggctgggcgcgccccgccagacccggcctcgggattccctcctcccggcgagtctccgcccgccccgtcctggaggtggggagaaggagggcggggcgggggggacggaaactctccccgccaaatcctggccccaggcctggggacactcgcggcgggaagatttggaggggaggggagggggaggggcgtgggggcgcggcctcgctggagtccccctgaccccccgacccccgcccaccggcctgggcgtcctcccgcggcccctcctcccctcccggcgcccggtgctctggggcgcgtgccacgcctggctcggcgccgtaggggcccccgcaggtagagacccctggaaatggcctcgacgccgcaggagcgaggcggccaccaccccgctaatccgggcacgtctctccaggccgaggcctgcggtggaaaagccggggttccatttgtgctgagtcggggcggccgaatggagccaggcctcgggacgcgggacggacgggctctggccgcgcaccttcgcgggctctgcagcgcccgaccgcctcccccggcagggaggaggcgcttgtggggggcacccacggggcacagtgatccctgggggtctgcggacctcctgggccccgcagcagacacgagtttagcctttgggtttagtttaaatcacataagggtgtcgtgcaatcgatttatggtttctacacaccagacactttaacctccaaccccccccatccaagccaacaagaaaatgcggtgccgtgttggcagctgagctgcgcccgaagagacgcagggagacgtaagagaggaaagtgtgagtggccggggggcctccccccgtcagaagtcgcgcagtcgcgcccataaaacgccccctccgggcggctagggcaggtgagcgcgtccccgggcctccccacgccggcccctgccacagagccgtctaggtcgagcagatatttacagaataaaaatgacaataactcgacgtcccgggacggccacgcaatctgttagtaatttagcgggatgggaatttcctttctagggcctgccagtgaagcgcttttccaaatttccacagcgggggaagcctgcgattttacataatgacttcagcatgccgggctttctcgacacccctccccggcccccggcccccgccccccgccccttttccagcagggccgggctccctccggacacccgcgtggactcaggcgtcccgtctggcccgttcgcccccgtttcccccgccagccccagcgcccccctgcccggcccccggattccccgttcccgcccctacgcccccatcccctccccgtgcgcccctccccgtgcgcccccctccccgtgcgccccccctccccgtgcgcccccctccccgtgcgccccccctccccgggcgcccccctccccgggcgccccccctccccgtgcgcccccccctccccgtgcgccccccctccccgtgcgcgccccgcctcttgcgcccctgcccccaggcgagcggctgccgcggcgcggggaggggcgggcgctcggcgactcgtccccggggccccgcgcgggcccgggcagcaggggcgtgatgtcacggcagggagggggcgcgggagccgccgggccggcggggaggcgggggaggtgttttccagctttaaaaaggcaggaggcagagcgcggccctgcgtcagagcgagactcagaggtctagagccaccatgagcctctggcagcccctggtcctggtgctcctggtgctgggctgctgctttgctgcccccagacagcgccagtccacccttgtgctcttccctggagacctgagaaccaatctcaccgacaggcagctggcagaggaatacctgtaccgctatggttacactcgggtggcagagatgcgtggagagtcgaaatctctggggcctgcgctgctgcttctccagaagcaactgtccctgcccgagaccggtgagctggatagcgccacgctgaaggccatgcgaaccccacggtgcggggtcccagacctgggcagattccaaacctttgagggcgacctcaagtggcaccaccacaacatcacctattggatccaaaactactcggaagacttgccgcgggcggtgattgacgacgcctttgcccgcgccttcgcactgtggagcgcggtgacgccgctcaccttcactcgcgtgtacagccgggacgcagacatcgtcatccagtttggtgtcgcggagcacggagacgggtatcccttcgacgggaaggacgggctcctggcacacgcctttcctcctggccccggcattcagggagacgcccatttcgacgatgacgagttgtggtccctgggcaagggcgtcgtggttccaactcggtttggaaacgcagatggcgcggcctgccacttccccttcatcttcgagggccgctcctactctgcctgcaccaccgacggtcgctccgacggcttgccctggtgcagtaccacggccaactacgacaccgacgaccggtttggcttctgccccagcgagagactctacacccaggacggcaatgctgatgggaaaccctgccagtttccattcatcttccaaggccaatcctactccgcctgcaccacggacggtcgctccgacggctaccgctggtgcgccaccaccgccaactacgaccgggacaagctcttcggcttctgcccgacccgagctgactcgacggtgatggggggcaactcggcgggggagctgtgcgtcttccccttcactttcctgggtaaggagtactcgacctgtaccagcgagggccgcggagatgggcgcctctggtgcgctaccacctcgaactttgacagcgacaagaagtggggcttctgcccggaccaaggatacagtttgttcctcgtggcggcgcatgagttcggccacgcgctgggcttagatcattcctcagtgccggaggcgctcatgtaccctatgtaccgcttcactgaggggccccccttgcataaggacgacgtgaatggcatccggcacctctatggtcctcgccctgaacctgagccacggcctccaaccaccaccacaccgcagcccacggctcccccgacggtctgccccaccggaccccccactgtccacccctcagagcgccccacagctggccccacaggtcccccctcagctggccccacaggtccccccactgctggcccttctacggccactactgtgcctttgagtccggtggacgatgcctgcaacgtgaacatcttcgacgccatcgcggagattgggaaccagctgtatttgttcaaggatgggaagtactggcgattctctgagggcagggggagccggccgcagggccccttccttatcgccgacaagtggcccgcgctgccccgcaagctggactcggtctttgaggagcggctctccaagaagcttttcttcttctctgggcgccaggtgtgggtgtacacaggcgcgtcggtgctgggcccgaggcgtctggacaagctgggcctgggagccgacgtggcccaggtgaccggggccctccggagtggcagggggaagatgctgctgttcagcgggcggcgcctctggaggttcgacgtgaaggcgcagatggtggatccccggagcgccagcgaggtggaccggatgttccccggggtgcctttggacacgcacgacgtcttccagtaccgagagaaagcctatttctgccaggaccgcttctactggcgcgtgagttcccggagtgagttgaaccaggtggaccaagtgggctacgtgacctatgacatcctgcagtgccctgaggacgattacaaggatgacgacgataagtgataa

SEQ ID NO: 648 - DNA, 3260 bp, synthetic construct
  misc_feature 1..3260: note = NFATc1P-MMP9cat
  source 1..3260: mol_type = other DNA
aggcaggaggaagaggaaaggggcgcagggcgctcggggagcagagccgggggcccgcggtggccgcagaggccgggccggggcgcagaggccgggcgagctggccgcgctctgggccgccgcctccggaactccctgcgcctggcgcgcggccaccgtggtcccggcaacggcattaaacagagggaaacagacccgggattccgtcacccgggcggggggataaggacggctttgagagcagacaggaaaagggagcttttctgcatggggtgaaaaaattatttattgaaggaggaggaggcggcagcggaggaaggggaggggcgggaggaggaggaagagccggccgcccccgccccggccccggctcctcaggagccaagggcagcctcgccaggtcggtcccgggctcgaggaccgcggctggggtcgaggggctcagtctcccacgtgaccggctgggcgcgccccgccagacccggcctcgggattccctcctcccggcgagtctccgcccgccccgtcctggaggtggggagaaggagggcggggcgggggggacggaaactctccccgccaaatcctggccccaggcctggggacactcgcggcgggaagatttggaggggaggggagggggaggggcgtgggggcgcggcctcgctggagtccccctgaccccccgacccccgcccaccggcctgggcgtcctcccgcggcccctcctcccctcccggcgcccggtgctctggggcgcgtgccacgcctggctcggcgccgtaggggcccccgcaggtagagacccctggaaatggcctcgacgccgcaggagcgaggcggccaccaccccgctaatccgggcacgtctctccaggccgaggcctgcggtggaaaagccggggttccatttgtgctgagtcggggcggccgaatggagccaggcctcgggacgcgggacggacgggctctggccgcgcaccttcgcgggctctgcagcgcccgaccgcctcccccggcagggaggaggcgcttgtggggggcacccacggggcacagtgatccctgggggtctgcggacctcctgggccccgcagcagacacgagtttagcctttgggtttagtttaaatcacataagggtgtcgtgcaatcgatttatggtttctacacaccagacactttaacctccaaccccccccatccaagccaacaagaaaatgcggtgccgtgttggcagctgagctgcgcccgaagagacgcagggagacgtaagagaggaaagtgtgagtggccggggggcctccccccgtcagaagtcgcgcagtcgcgcccataaaacgccccctccgggcggctagggcaggtgagcgcgtccccgggcctccccacgccggcccctgccacagagccgtctaggtcgagcagatatttacagaataaaaatgacaataactcgacgtcccgggacggccacgcaatctgttagtaatttagcgggatgggaatttcctttctagggcctgccagtgaagcgcttttccaaatttccacagcgggggaagcctgcgattttacataatgacttcagcatgccgggctttctcgacacccctccccggcccccggcccccgccccccgccccttttccagcagggccgggctccctccggacacccgcgtggactcaggcgtcccgtctggcccgttcgcccccgtttcccccgccagccccagcgcccccctgcccggcccccggattccccgttcccgcccctacgcccccatcccctccccgtgcgcccctccccgtgcgcccccctccccgtgcgccccccctccccgtgcgcccccctccccgtgcgccccccctccccgggcgcccccctccccgggcgccccccctccccgtgcgcccccccctccccgtgcgccccccctccccgtgcgcgccccgcctcttgcgcccctgcccccaggcgagcggctgccgcggcgcggggaggggcgggcgctcggcgactcgtccccggggccccgcgcgggcccgggcagcaggggcgtgatgtcacggcagggagggggcgcgggagccgccgggccggcggggaggcgggggaggtgttttccagctttaaaaaggcaggaggcagagcgcggccctgcgtcagagcgagactcagaggtctagagccaccatgttccaaacctttgagggcgacctcaagtggcaccaccacaacatcacctattggatccaaaactactcggaagacttgccgcgggcggtgattgacgacgcctttgcccgcgccttcgcactgtggagcgcggtgacgccgctcaccttcactcgcgtgtacagccgggacgcagacatcgtcatccagtttggtgtcgcggagcacggagacgggtatcccttcgacgggaaggacgggctcctggcacacgcctttcctcctggccccggcattcagggagacgcccatttcgacgatgacgagttgtggtccctgggcaagggcgtcgtggttccaactcggtttggaaacgcagatggcgcggcctgccacttccccttcatcttcgagggccgctcctactctgcctgcaccaccgacggtcgctccgacggcttgccctggtgcagtaccacggccaactacgacaccgacgaccggtttggcttctgccccagcgagagactctacacccaggacggcaatgctgatgggaaaccctgccagtttccattcatcttccaaggccaatcctactccgcctgcaccacggacggtcgctccgacggctaccgctggtgcgccaccaccgccaactacgaccgggacaagctcttcggcttctgcccgacccgagctgactcgacggtgatggggggcaactcggcgggggagctgtgcgtcttccccttcactttcctgggtaaggagtactcgacctgtaccagcgagggccgcggagatgggcgcctctggtgcgctaccacctcgaactttgacagcgacaagaagtggggcttctgcccggaccaaggatacagtttgttcctcgtggcggcgcatgagttcggccacgcgctgggcttagatcattcctcagtgccggaggcgctcatgtaccctatgtaccgcttcactgaggggccccccttgcataaggacgacgtgaatggcatccggcacctctatggtcctcgccctgaacctgattacaaggatgacgacgataagtgataa

SEQ ID NO: 649 - DNA, 30 bp, synthetic construct
  misc_feature 1..30: note = NFAT response element
  source 1..30: mol_type = other DNA
ggaggaaaaactgtttcatacagaaggcgt

SEQ ID NO: 650 - DNA, 90 bp, synthetic construct
  misc_feature 1..90: note = NFAT response element repeats
  source 1..90: mol_type = other DNA
ggaggaaaaactgtttcatacagaaggcgtggaggaaaaactgtttcatacagaaggcgtggaggaaaaactgtttcatacagaaggcgt

SEQ ID NO: 651 - DNA, 61 bp, synthetic construct
  misc_feature 1..61: note = CMV minimal promoter
  source 1..61: mol_type = other DNA
aggtaggcgtgtacggtgggaggtctatataagcagagctggtttagtgaaccgtcagatc

SEQ ID NO: 652 - DNA, 2326 bp, synthetic construct
  misc_feature 1..2326: note = NFATREmCMV-MMP9
  source 1..2326: mol_type = other DNA
ggaggaaaaactgtttcatacagaaggcgtggaggaaaaactgtttcatacagaaggcgtggaggaaaaactgtttcatacagaaggcgtagatctagactcaggtaggcgtgtacggtgggaggtctatataagcagagctggtttagtgaaccgtcagatctctagagccaccatgagcctctggcagcccctggtcctggtgctcctggtgctgggctgctgctttgctgcccccagacagcgccagtccacccttgtgctcttccctggagacctgagaaccaatctcaccgacaggcagctggcagaggaatacctgtaccgctatggttacactcgggtggcagagatgcgtggagagtcgaaatctctggggcctgcgctgctgcttctccagaagcaactgtccctgcccgagaccggtgagctggatagcgccacgctgaaggccatgcgaaccccacggtgcggggtcccagacctgggcagattccaaacctttgagggcgacctcaagtggcaccaccacaacatcacctattggatccaaaactactcggaagacttgccgcgggcggtgattgacgacgcctttgcccgcgccttcgcactgtggagcgcggtgacgccgctcaccttcactcgcgtgtacagccgggacgcagacatcgtcatccagtttggtgtcgcggagcacggagacgggtatcccttcgacgggaaggacgggctcctggcacacgcctttcctcctggccccggcattcagggagacgcccatttcgacgatgacgagttgtggtccctgggcaagggcgtcgtggttccaactcggtttggaaacgcagatggcgcggcctgccacttccccttcatcttcgagggccgctcctactctgcctgcaccaccgacggtcgctccgacggcttgccctggtgcagtaccacggccaactacgacaccgacgaccggtttggcttctgccccagcgagagactctacacccaggacggcaatgctgatgggaaaccctgccagtttccattcatcttccaaggccaatcctactccgcctgcaccacggacggtcgctccgacggctaccgctggtgcgccaccaccgccaactacgaccgggacaagctcttcggcttctgcccgacccgagctgactcgacggtgatggggggcaactcggcgggggagctgtgcgtcttccccttcactttcctgggtaaggagtactcgacctgtaccagcgagggccgcggagatgggcgcctctggtgcgctaccacctcgaactttgacagcgacaagaagtggggcttctgcccggaccaaggatacagtttgttcctcgtggcggcgcatgagttcggccacgcgctgggcttagatcattcctcagtgccggaggcgctcatgtaccctatgtaccgcttcactgaggggccccccttgcataaggacgacgtgaatggcatccggcacctctatggtcctcgccctgaacctgagccacggcctccaaccaccaccacaccgcagcccacggctcccccgacggtctgccccaccggaccccccactgtccacccctcagagcgccccacagctggccccacaggtcccccctcagctggccccacaggtccccccactgctggcccttctacggccactactgtgcctttgagtccggtggacgatgcctgcaacgtgaacatcttcgacgccatcgcggagattgggaaccagctgtatttgttcaaggatgggaagtactggcgattctctgagggcagggggagccggccgcagggccccttccttatcgccgacaagtggcccgcgctgccccgcaagctggactcggtctttgaggagcggctctccaagaagcttttcttcttctctgggcgccaggtgtgggtgtacacaggcgcgtcggtgctgggcccgaggcgtctggacaagctgggcctgggagccgacgtggcccaggtgaccggggccctccggagtggcagggggaagatgctgctgttcagcgggcggcgcctctggaggttcgacgtgaaggcgcagatggtggatccccggagcgccagcgaggtggaccggatgttccccggggtgcctttggacacgcacgacgtcttccagtaccgagagaaagcctatttctgccaggaccgcttctactggcgcgtgagttcccggagtgagttgaaccaggtggaccaagtgggctacgtgacctatgacatcctgcagtgccctgaggacgattacaaggatgacgacgataagtgataa

SEQ ID NO: 653 - DNA, 1237 bp, synthetic construct
  misc_feature 1..1237: note = NFATREmCMV-MMP9cat
  source 1..1237: mol_type = other DNA
ggaggaaaaactgtttcatacagaaggcgtggaggaaaaactgtttcatacagaaggcgtggaggaaaaactgtttcatacagaaggcgtagatctagactcaggtaggcgtgtacggtgggaggtctatataagcagagctggtttagtgaaccgtcagatctctagagccaccatgttccaaacctttgagggcgacctcaagtggcaccaccacaacatcacctattggatccaaaactactcggaagacttgccgcgggcggtgattgacgacgcctttgcccgcgccttcgcactgtggagcgcggtgacgccgctcaccttcactcgcgtgtacagccgggacgcagacatcgtcatccagtttggtgtcgcggagcacggagacgggtatcccttcgacgggaaggacgggctcctggcacacgcctttcctcctggccccggcattcagggagacgcccatttcgacgatgacgagttgtggtccctgggcaagggcgtcgtggttccaactcggtttggaaacgcagatggcgcggcctgccacttccccttcatcttcgagggccgctcctactctgcctgcaccaccgacggtcgctccgacggcttgccctggtgcagtaccacggccaactacgacaccgacgaccggtttggcttctgccccagcgagagactctacacccaggacggcaatgctgatgggaaaccctgccagtttccattcatcttccaaggccaatcctactccgcctgcaccacggacggtcgctccgacggctaccgctggtgcgccaccaccgccaactacgaccgggacaagctcttcggcttctgcccgacccgagctgactcgacggtgatggggggcaactcggcgggggagctgtgcgtcttccccttcactttcctgggtaaggagtactcgacctgtaccagcgagggccgcggagatgggcgcctctggtgcgctaccacctcgaactttgacagcgacaagaagtggggcttctgcccggaccaaggatacagtttgttcctcgtggcggcgcatgagttcggccacgcgctgggcttagatcattcctcagtgccggaggcgctcatgtaccctatgtaccgcttcactgaggggccccccttgcataaggacgacgtgaatggcatccggcacctctatggtcctcgccctgaacctgattacaaggatgacgacgataagtgataa

SEQ ID NO: 654 - DNA, 747 bp, synthetic construct; identical to SEQ ID NO: 238
  misc_feature 1..747: note = C2 scFv
  source 1..747: mol_type = other DNA

SEQ ID NO: 655 - protein, 249 aa, synthetic construct; identical to SEQ ID NO: 239
  REGION 1..249: note = C2 scFv

SEQ ID NO: 656 - DNA, 72 bp, synthetic construct
  misc_feature 1..72: note = CD8 transmembrane domain
  source 1..72: mol_type = other DNA
atctacatctgggcgcccttggccgggacttgtggggtccttctcctgtcactggttatcaccctttactgc

SEQ ID NO: 657 - protein, 24 aa, synthetic construct
  REGION 1..24: note = CD8 transmembrane domain
IYIWAPLAGTCGVLLLSLVITLYC

SEQ ID NO: 658 - DNA, 126 bp, synthetic construct
  misc_feature 1..126: note = 4-1BB domain
  source 1..126: mol_type = other DNA
aaacggggcagaaagaaactcctgtatatattcaaacaaccatttatgagaccagtacaaactactcaagaggaagatggctgtagctgccgatttccagaagaagaagaaggaggatgtgaactg

SEQ ID NO: 659 - protein, 42 aa, synthetic construct; identical to SEQ ID NO: 380
  REGION 1..42: note = 4-1BB domain

SEQ ID NO: 660 - DNA, 336 bp, synthetic construct
  misc_feature 1..336: note = CD3zeta domain
  source 1..336: mol_type = other DNA
agagtgaagttcagcaggagcgcagacgcccccgcgtacaagcagggccagaaccagctctataacgagctcaatctaggacgaagagaggagtacgatgttttggacaagagacgtggccgggaccctgagatggggggaaagccgagaaggaagaaccctcaggaaggcctgtacaatgaactgcagaaagataagatggcggaggcctacagtgagattgggatgaaaggcgagcgccggaggggcaaggggcacgatggcctttaccagggtctcagtacagccaccaaggacacctacgacgcccttcacatgcaggccctgccccctcgc

SEQ ID NO: 661 - protein, 112 aa, synthetic construct; identical to SEQ ID NO: 374
  REGION 1..112: note = CD3zeta domain

SEQ ID NO: 662 - DNA, 696 bp, synthetic construct
  misc_feature 1..696: note = Human IgG1 Fc linker
  source 1..696: mol_type = other DNA
gagcccaaatcttgtgacaaaactcacacatgcccaccgtgcccagcacctgaactcctggggggaccgtcagtcttcctcttccccccaaaacccaaggacaccctcatgatctcccggacccctgaggtcacatgcgtggtggtggacgtgagccacgaagaccctgaggtcaagttcaactggtacgtggacggcgtggaggtgcataatgccaagacaaagccgcgggaggagcagtacaacagcacgtaccgtgtggtcagcgtcctcaccgtcctgcaccaggactggctgaatggcaaggagtacaagtgcaaggtctccaacaaagccctcccagcccccatcgagaaaaccatctccaaagccaaagggcagccccgagaaccacaggtgtacaccctgcccccatcccgggaggagatgaccaagaaccaggtcagcctgacctgcctggtcaaaggcttctatcccagcgacatcgccgtggagtgggagagcaatgggcagccggagaacaactacaagaccacgcctcccgtgctggactccgacggctccttcttcctctacagcaagctcaccgtggacaagagcaggtggcagcaggggaacgtcttctcatgctccgtgatgcatgaggctctgcacaaccactacacgcagaagagcctctccctgtctccgggtaaa

SEQ ID NO: 663 - protein, 232 aa, synthetic construct; identical to SEQ ID NO: 273
  REGION 1..232: note = Human IgG1 Fc linker

SEQ ID NO: 664 - DNA, 1983 bp, synthetic construct
  misc_feature 1..1983: note = C2 CAR FC linker
  source 1..1983: mol_type = other DNA
gaggtgcagctggtggagtctgggggaggcctggtcaagcctggggggtccctgagactctcctgtgcagcctctggattcaccttcagtggctatgccatgagctgggtccgccaggctccagggaaggggctggagtgggtctcaaccattagtagtggcggaacctacatatactaccccgactcagtgaagggccgattcaccatctccagagacaacgccaagaactcactgtatctgcaaatgaacagcctgagagccgaggacacggccgtgtattactgtgcgagacttgggggggataattactacgaatacttcgatgtctggggcaaagggaccacggtcaccgtctcctccggcggtggcggatccggcggtggcggatccggcggtggcggatccgacattgtgctgacccagtctccagcctccttggccgtgtctccaggacagagggccaccatcacctgcagagccagtaagagtgtcagtaccagcggatactcctacatgcactggtatcagcagaaaccaggacaacctcctaaactcctgatttacctggcatccaatctggagagcggggtcccagccaggttcagcggcagtgggtctgggaccgatttcaccctcacaattaatcctgtggaagctaatgatactgcaaattattactgtcagcacagtagggagctgcctttcacattcggcggagggaccaaggtggagatcaaacgaactgagcccaaatcttgtgacaaaactcacacatgcccaccgtgcccagcacctgaactcctggggggaccgtcagtcttcctcttccccccaaaacccaaggacaccctcatgatctcccggacccctgaggtcacatgcgtggtggtggacgtgagccacgaagaccctgaggtcaagttcaactggtacgtggacggcgtggaggtgcataatgccaagacaaagccgcgggaggagcagtacaacagcacgtaccgtgtggtcagcgtcctcaccgtcctgcaccaggactggctgaatggcaaggagtacaagtgcaaggtctccaacaaagccctcccagcccccatcgagaaaaccatctccaaagccaaagggcagccccgagaaccacaggtgtacaccctgcccccatcccgggaggagatgaccaagaaccaggtcagcctgacctgcctggtcaaaggcttctatcccagcgacatcgccgtggagtgggagagcaatgggcagccggagaacaactacaagaccacgcctcccgtgctggactccgacggctccttcttcctctacagcaagctcaccgtggacaagagcaggtggcagcaggggaacgtcttctcatgctccgtgatgcatgaggctctgcacaaccactacacgcagaagagcctctccctgtctccgggtaaaatctacatctgggcgcccttggccgggacttgtggggtccttctcctgtcactggttatcaccctttactgcaaacggggcagaaagaaactcctgtatatattcaaacaaccatttatgagaccagtacaaactactcaagaggaagatggctgtagctgccgatttccagaagaagaagaaggaggatgtgaactgagagtgaagttcagcaggagcgcagacgcccccgcgtacaagcagggccagaaccagctctataacgagctcaatctaggacgaagagaggagtacgatgttttggacaagagacgtggccgggaccctgagatggggggaaagccgagaaggaagaaccctcaggaaggcctgtacaatgaactgcagaaagataagatggcggaggcctacagtgagattgggatgaaaggcgagcgccggaggggcaaggggcacgatggcctttaccagggtctcagtacagccaccaaggacacctacgacgcccttcacatgcaggccctgccccctcgctgataa

SEQ ID NO: 665 - protein, 659 aa, synthetic construct
  REGION 1..659: note = C2 CAR FC linker
EVQLVESGGGLVKPGGSLRLSCAASGFTFSGYAMSWVRQAPGKGLEWVSTISSGGTYIYYPDSVKGRFTISRDNAKNSLYLQMNSLRAEDTAVYYCARLGGDNYYEYFDVWGKGTTVTVSSGGGGSGGGGSGGGGSDIVLTQSPASLAVSPGQRATITCRASKSVSTSGYSYMHWYQQKPGQPPKLLIYLASNLESGVPARFSGSGSGTDFTLTINPVEANDTANYYCQHSRELPFTFGGGTKVEIKRTEPKSCDKTHTCPPCPAPELLGGPSVFLFPPKPKDTLMISRTPEVTCVVVDVSHEDPEVKFNWYVDGVEVHNAKTKPREEQYNSTYRVVSVLTVLHQDWLNGKEYKCKVSNKALPAPIEKTISKAKGQPREPQVYTLPPSREEMTKNQVSLTCLVKGFYPSDIAVEWESNGQPENNYKTTPPVLDSDGSFFLYSKLTVDKSRWQQGNVFSCSVMHEALHNHYTQKSLSLSPGKIYIWAPLAGTCGVLLLSLVITLYCKRGRKKLLYIFKQPFMRPVQTTQEEDGCSCRFPEEEEGGCELRVKFSRSADAPAYKQGQNQLYNELNLGRREEYDVLDKRRGRDPEMGGKPRRKNPQEGLYNELQKDKMAEAYSEIGMKGERRRGKGHDGLYQGLSTATKDTYDALHMQALPPR

SEQ ID NO: 666 - DNA, 870 bp, synthetic construct
  misc_feature 1..870: note = IgD/Fc linker
  source 1..870: mol_type = other DNA
gagtctccaaaggcacaggcctcctcagtgcccactgcacaaccccaagcagagggcagcctcgccaaggcaaccacagccccagccaccacccgtaacacaggaagaggcggcgaagagaagaaaaaggagaaggagaaagaggaacaagaagagagagagacaaagacaccagagcccaaatcttgtgacaaaactcacacatgcccaccgtgcccagcacctgaactcctggggggaccgtcagtcttcctcttccccccaaaacccaaggacaccctcatgatctcccggacccctgaggtcacatgcgtggtggtggacgtgagccacgaagaccctgaggtcaagttcaactggtacgtggacggcgtggaggtgcataatgccaagacaaagccgcgggaggagcagtacaacagcacgtaccgtgtggtcagcgtcctcaccgtcctgcaccaggactggctgaatggcaaggagtacaagtgcaaggtctccaacaaagccctcccagcccccatcgagaaaaccatctccaaagccaaagggcagccccgagaaccacaggtgtacaccctgcccccatcccgggaggagatgaccaagaaccaggtcagcctgacctgcctggtcaaaggcttctatcccagcgacatcgccgtggagtgggagagcaatgggcagccggagaacaactacaagaccacgcctcccgtgctggactccgacggctccttcttcctctacagcaagctcaccgtggacaagagcaggtggcagcaggggaacgtcttctcatgctccgtgatgcatgaggctctgcacaaccactacacgcagaagagcctctccctgtctccgggtaaa

SEQ ID NO: 667 - protein, 290 aa, synthetic construct
  REGION 1..290: note = IgD/Fc linker
ESPKAQASSVPTAQPQAEGSLAKATTAPATTRNTGRGGEEKKKEKEKEEQEERETKTPEPKSCDKTHTCPPCPAPELLGGPSVFLFPPKPKDTLMISRTPEVTCVVVDVSHEDPEVKFNWYVDGVEVHNAKTKPREEQYNSTYRVVSVLTVLHQDWLNGKEYKCKVSNKALPAPIEKTISKAKGQPREPQVYTLPPSREEMTKNQVSLTCLVKGFYPSDIAVEWESNGQPENNYKTTPPVLDSDGSFFLYSKLTVDKSRWQQGNVFSCSVMHEALHNHYTQKSLSLSPGK

SEQ ID NO: 668 - DNA, 2157 bp, synthetic construct
  misc_feature 1..2157: note = C2 CAR IgD/FC linker
  source 1..2157: mol_type = other DNA
gaggtgcagctggtggagtctgggggaggcctggtcaagcctggggggtccctgagactctcctgtgcagcctctggattcaccttcagtggctatgccatgagctgggtccgccaggctccagggaaggggctggagtgggtctcaaccattagtagtggcggaacctacatatactaccccgactcagtgaagggccgattcaccatctccagagacaacgccaagaactcactgtatctgcaaatgaacagcctgagagccgaggacacggccgtgtattactgtgcgagacttgggggggataattactacgaatacttcgatgtctggggcaaagggaccacggtcaccgtctcctccggcggtggcggatccggcggtggcggatccggcggtggcggatccgacattgtgctgacccagtctccagcctccttggccgtgtctccaggacagagggccaccatcacctgcagagccagtaagagtgtcagtaccagcggatactcctacatgcactggtatcagcagaaaccaggacaacctcctaaactcctgatttacctggcatccaatctggagagcggggtcccagccaggttcagcggcagtgggtctgggaccgatttcaccctcacaattaatcctgtggaagctaatgatactgcaaattattactgtcagcacagtagggagctgcctttcacattcggcggagggaccaaggtggagatcaaacgaactgagtctccaaaggcacaggcctcctcagtgcccactgcacaaccccaagcagagggcagcctcgccaaggcaaccacagccccagccaccacccgtaacacaggaagaggcggcgaagagaagaaaaaggagaaggagaaagaggaacaagaagagagagagacaaagacaccagagcccaaatcttgtgacaaaactcacacatgcccaccgtgcccagcacctgaactcctggggggaccgtcagtcttcctcttccccccaaaacccaaggacaccctcatgatctcccggacccctgaggtcacatgcgtggtggtggacgtgagccacgaagaccctgaggtcaagttcaactggtacgtggacggcgtggaggtgcataatgccaagacaaagccgcgggaggagcagtacaacagcacgtaccgtgtggtcagcgtcctcaccgtcctgcaccaggactggctgaatggcaaggagtacaagtgcaaggtctccaacaaagccctcccagcccccatcgagaaaaccatctccaaagccaaagggcagccccgagaaccacaggtgtacaccctgcccccatcccgggaggagatgaccaagaaccaggtcagcctgacctgcctggtcaaaggcttctatcccagcgacatcgccgtggagtgggagagcaatgggcagccggagaacaactacaagaccacgcctcccgtgctggactccgacggctccttcttcctctacagcaagctcaccgtggacaagagcaggtggcagcaggggaacgtcttctcatgctccgtgatgcatgaggctctgcacaaccactacacgcagaagagcctctccctgtctccgggtaaaatctacatctgggcgcccttggccgggacttgtggggtccttctcctgtcactggttatcaccctttactgcaaacggggcagaaagaaactcctgtatatattcaaacaaccatttatgagaccagtacaaactactcaagaggaagatggctgtagctgccgatttccagaagaagaagaaggaggatgtgaactgagagtgaagttcagcaggagcgcagacgcccccgcgtacaagcagggccagaaccagctctataacgagctcaatctaggacgaagagaggagtacgatgttttggacaagagacgtggccgggaccctgagatggggggaaagccgagaaggaagaaccctcaggaaggcctgtacaatgaactgcagaaagataagatggcggaggcctacagtgagattgggatgaaaggcgagcgccggaggggcaaggggcacgatggcctttaccagggtctcagtacagccaccaaggacacctacgacgcccttcacatgcaggccctgccccctcgctgataa

SEQ ID NO: 669 - protein, 717 aa, synthetic construct
  REGION 1..717: note = C2 CAR IgD/FC linker
EVQLVESGGGLVKPGGSLRLSCAASGFTFSGYAMSWVRQAPGKGLEWVSTISSGGTYIYYPDSVKGRFTISRDNAKNSLYLQMNSLRAEDTAVYYCARLGGDNYYEYFDVWGKGTTVTVSSGGGGSGGGGSGGGGSDIVLTQSPASLAVSPGQRATITCRASKSVSTSGYSYMHWYQQKPGQPPKLLIYLASNLESGVPARFSGSGSGTDFTLTINPVEANDTANYYCQHSRELPFTFGGGTKVEIKRTESPKAQASSVPTAQPQAEGSLAKATTAPATTRNTGRGGEEKKKEKEKEEQEERETKTPEPKSCDKTHTCPPCPAPELLGGPSVFLFPPKPKDTLMISRTPEVTCVVVDVSHEDPEVKFNWYVDGVEVHNAKTKPREEQYNSTYRVVSVLTVLHQDWLNGKEYKCKVSNKALPAPIEKTISKAKGQPREPQVYTLPPSREEMTKNQVSLTCLVKGFYPSDIAVEWESNGQPENNYKTTPPVLDSDGSFFLYSKLTVDKSRWQQGNVFSCSVMHEALHNHYTQKSLSLSPGKIYIWAPLAGTCGVLLLSLVITLYCKRGRKKLLYIFKQPFMRPVQTTQEEDGCSCRFPEEEEGGCELRVKFSRSADAPAYKQGQNQLYNELNLGRREEYDVLDKRRGRDPEMGGKPRRKNPQEGLYNELQKDKMAEAYSEIGMKGERRRGKGHDGLYQGLSTATKDTYDALHMQALPPR

SEQ ID NO: 670 - DNA, 651 bp, synthetic construct
  misc_feature 1..651: note = Fc hingeless Y407R linker
  source 1..651: mol_type = other DNA
gcacctgaactcctggggggaccgtcagtcttcctcttccccccaaaacccaaggacaccctcatgatctcccggacccctgaggtcacatgcgtggtggtggacgtgagccacgaagaccctgaggtcaagttcaactggtacgtggacggcgtggaggtgcataatgccaagacaaagccgcgggaggagcagtacaacagcacgtaccgtgtggtcagcgtcctcaccgtcctgcaccaggactggctgaatggcaaggagtacaagtgcaaggtctccaacaaagccctcccagcccccatcgagaaaaccatctccaaagccaaagggcagccccgagaaccacaggtgtacaccctgcccccatcccgggaggagatgaccaagaaccaggtcagcctgacctgcctggtcaaaggcttctatcccagcgacatcgccgtggagtgggagagcaatgggcagccggagaacaactacaagaccacgcctcccgtgctggactccgacggctccttcttcctcaggagcaagctcaccgtggacaagagcaggtggcagcaggggaacgtcttctcatgctccgtgatgcatgaggctctgcacaaccactacacgcagaagagcctctccctgtctccgggtaaa

SEQ ID NO: 671 - protein, 217 aa, synthetic construct
  REGION 1..217: note = Fc hingeless Y407R linker
APELLGGPSVFLFPPKPKDTLMISRTPEVTCVVVDVSHEDPEVKFNWYVDGVEVHNAKTKPREEQYNSTYRVVSVLTVLHQDWLNGKEYKCKVSNKALPAPIEKTISKAKGQPREPQVYTLPPSREEMTKNQVSLTCLVKGFYPSDIAVEWESNGQPENNYKTTPPVLDSDGSFFLRSKLTVDKSRWQQGNVFSCSVMHEALHNHYTQKSLSLSPGK

SEQ ID NO: 672 - DNA, 1938 bp, synthetic construct
  misc_feature 1..1938: note = C2 CAR FCHingeless/Y407R linker
  source 1..1938: mol_type = other DNA
gaggtgcagctggtggagtctgggggaggcctggtcaagcctggggggtccctgagactctcctgtgcagcctctggattcaccttcagtggctatgccatgagctgggtccgccaggctccagggaaggggctggagtgggtctcaaccattagtagtggcggaacctacatatactaccccgactcagtgaagggccgattcaccatctccagagacaacgccaagaactcactgtatctgcaaatgaacagcctgagagccgaggacacggccgtgtattactgtgcgagacttgggggggataattactacgaatacttcgatgtctggggcaaagggaccacggtcaccgtctcctccggcggtggcggatccggcggtggcggatccggcggtggcggatccgacattgtgctgacccagtctccagcctccttggccgtgtctccaggacagagggccaccatcacctgcagagccagtaagagtgtcagtaccagcggatactcctacatgcactggtatcagcagaaaccaggacaacctcctaaactcctgatttacctggcatccaatctggagagcggggtcccagccaggttcagcggcagtgggtctgggaccgatttcaccctcacaattaatcctgtggaagctaatgatactgcaaattattactgtcagcacagtagggagctgcctttcacattcggcggagggaccaaggtggagatcaaacgaactgcacctgaactcctggggggaccgtcagtcttcctcttccccccaaaacccaaggacaccctcatgatctcccggacccctgaggtcacatgcgtggtggtggacgtgagccacgaagaccctgaggtcaagttcaactggtacgtggacggcgtggaggtgcataatgccaagacaaagccgcgggaggagcagtacaacagcacgtaccgtgtggtcagcgtcctcaccgtcctgcaccaggactggctgaatggcaaggagtacaagtgcaaggtctccaacaaagccctcccagcccccatcgagaaaaccatctccaaagccaaagggcagccccgagaaccacaggtgtacaccctgcccccatcccgggaggagatgaccaagaaccaggtcagcctgacctgcctggtcaaaggcttctatcccagcgacatcgccgtggagtgggagagcaatgggcagccggagaacaactacaagaccacgcctcccgtgctggactccgacggctccttcttcctcaggagcaagctcaccgtggacaagagcaggtggcagcaggggaacgtcttctcatgctccgtgatgcatgaggctctgcacaaccactacacgcagaagagcctctccctgtctccgggtaaaatctacatctgggcgcccttggccgggacttgtggggtccttctcctgtcactggttatcaccctttactgcaaacggggcagaaagaaactcctgtatatattcaaacaaccatttatgagaccagtacaaactactcaagaggaagatggctgtagctgccgatttccagaagaagaagaaggaggatgtgaactgagagtgaagttcagcaggagcgcagacgcccccgcgtacaagcagggccagaaccagctctataacgagctcaatctaggacgaagagaggagtacgatgttttggacaagagacgtggccgggaccctgagatggggggaaagccgagaaggaagaaccctcaggaaggcctgtacaatgaactgcagaaagataagatggcggaggcctacagtgagattgggatgaaaggcgagcgccggaggggcaaggggcacgatggcctttaccagggtctcagtacagccaccaaggacacctacgacgcccttcacatgcaggccctgccccctcgctgataa

SEQ ID NO: 673 - protein, 644 aa, synthetic construct
  REGION 1..644: note = C2 CAR FCHingeless/Y407R linker
EVQLVESGGGLVKPGGSLRLSCAASGFTFSGYAMSWVRQAPGKGLEWVSTISSGGTYIYYPDSVKGRFTISRDNAKNSLYLQMNSLRAEDTAVYYCARLGGDNYYEYFDVWGKGTTVTVSSGGGGSGGGGSGGGGSDIVLTQSPASLAVSPGQRATITCRASKSVSTSGYSYMHWYQQKPGQPPKLLIYLASNLESGVPARFSGSGSGTDFTLTINPVEANDTANYYCQHSRELPFTFGGGTKVEIKRTAPELLGGPSVFLFPPKPKDTLMISRTPEVTCVVVDVSHEDPEVKFNWYVDGVEVHNAKTKPREEQYNSTYRVVSVLTVLHQDWLNGKEYKCKVSNKALPAPIEKTISKAKGQPREPQVYTLPPSREEMTKNQVSLTCLVKGFYPSDIAVEWESNGQPENNYKTTPPVLDSDGSFFLRSKLTVDKSRWQQGNVFSCSVMHEALHNHYTQKSLSLSPGKIYIWAPLAGTCGVLLLSLVITLYCKRGRKKLLYIFKQPFMRPVQTTQEEDGCSCRFPEEEEGGCELRVKFSRSADAPAYKQGQNQLYNELNLGRREEYDVLDKRRGRDPEMGGKPRRKNPQEGLYNELQKDKMAEAYSEIGMKGERRRGKGHDGLYQGLSTATKDTYDALHMQALPPR

SEQ ID NO: 674 - DNA, 825 bp, synthetic construct
  misc_feature 1..825: note = IgD/FCHingeless/Y407R linker
  source 1..825: mol_type = other DNA
gagtctccaaaggcacaggcctcctcagtgcccactgcacaaccccaagcagagggcagcctcgccaaggcaaccacagccccagccaccacccgtaacacaggaagaggcggcgaagagaagaaaaaggagaaggagaaagaggaacaagaagagagagagacaaagacaccagcacctgaactcctggggggaccgtcagtcttcctcttccccccaaaacccaaggacaccctcatgatctcccggacccctgaggtcacatgcgtggtggtggacgtgagccacgaagaccctgaggtcaagttcaactggtacgtggacggcgtggaggtgcataatgccaagacaaagccgcgggaggagcagtacaacagcacgtaccgtgtggtcagcgtcctcaccgtcctgcaccaggactggctgaatggcaaggagtacaagtgcaaggtctccaacaaagccctcccagcccccatcgagaaaaccatctccaaagccaaagggcagccccgagaaccacaggtgtacaccctgcccccatcccgggaggagatgaccaagaaccaggtcagcctgacctgcctggtcaaaggcttctatcccagcgacatcgccgtggagtgggagagcaatgggcagccggagaacaactacaagaccacgcctcccgtgctggactccgacggctccttcttcctcaggagcaagctcaccgtggacaagagcaggtggcagcaggggaacgtcttctcatgctccgtgatgcatgaggctctgcacaaccactacacgcagaagagcctctccctgtctccgggtaaa

SEQ ID NO: 675 - protein, 275 aa, synthetic construct
  REGION 1..275: note = IgD/FCHingeless/Y407R linker
ESPKAQASSVPTAQPQAEGSLAKATTAPATTRNTGRGGEEKKKEKEKEEQEERETKTPAPELLGGPSVFLFPPKPKDTLMISRTPEVTCVVVDVSHEDPEVKFNWYVDGVEVHNAKTKPREEQYNSTYRVVSVLTVLHQDWLNGKEYKCKVSNKALPAPIEKTISKAKGQPREPQVYTLPPSREEMTKNQVSLTCLVKGFYPSDIAVEWESNGQPENNYKTTPPVLDSDGSFFLRSKLTVDKSRWQQGNVFSCSVMHEALHNHYTQKSLSLSPGK

SEQ ID NO: 676 - DNA, 2045 bp, synthetic construct
  misc_feature 1..2045: note = C2 CAR IgD/FCHingeless/Y407R linker
  source 1..2045: mol_type = other DNA
cagcctctggattcaccttcagtggctatgccatgagctgggtccgccaggctccagggaaggggctggagtgggtctcaaccattagtagtggcggaacctacatatactaccccgactcagtgaagggccgattcaccatctccagagacaacgccaagaactcactgtatctgcaaatgaacagcctgagagccgaggacacggccgtgtattactgtgcgagacttgggggggataattactacgaatacttcgatgtctggggcaaagggaccacggtcaccgtctcctccggcggtggcggatccggcggtggcggatccggcggtggcggatccgacattgtgctgacccagtctccagcctccttggccgtgtctccaggacagagggccaccatcacctgcagagccagtaagagtgtcagtaccagcggatactcctacatgcactggtatcagcagaaaccaggacaacctcctaaactcctgatttacctggcatccaatctggagagcggggtcccagccaggttcagcggcagtgggtctgggaccgatttcaccctcacaattaatcctgtggaagctaatgatactgcaaattattactgtcagcacagtagggagctgcctttcacattcggcggagggaccaaggtggagatcaaacgaactgagtctccaaaggcacaggcctcctcagtgcccactgcacaaccccaagcagagggcagcctcgccaaggcaaccacagccccagccaccacccgtaacacaggaagaggcggcgaagagaagaaaaaggagaaggagaaagaggaacaagaagagagagagacaaagacaccagcacctgaactcctggggggaccgtcagtcttcctcttccccccaaaacccaaggacaccctcatgatctcccggacccctgaggtcacatgcgtggtggtggacgtgagccacgaagaccctgaggtcaagttcaactggtacgtggacggcgtggaggtgcataatgccaagacaaagccgcgggaggagcagtacaacagcacgtaccgtgtggtcagcgtcctcaccgtcctgcaccaggactggctgaatggcaaggagtacaagtgcaaggtctccaacaaagccctcccagcccccatcgagaaaaccatctccaaagccaaagggcagccccgagaaccacaggtgtacaccctgcccccatcccgggaggagatgaccaagaaccaggtcagcctgacctgcctggtcaaaggcttctatcccagcgacatcgccgtggagtgggagagcaatgggcagccggagaacaactacaagaccacgcctcccgtgctggactccgacggctccttcttcctcaggagcaagctcaccgtggacaagagcaggtggcagcaggggaacgtcttctcatgctccgtgatgcatgaggctctgcacaaccactacacgcagaagagcctctccctgtctccgggtaaaatctacatctgggcgcccttggccgggacttgtggggtccttctcctgtcactggttatcaccctttactgcaaacggggcagaaagaaactcctgtatatattcaaacaaccatttatgagaccagtacaaactactcaagaggaagatggctgtagctgccgatttccagaagaagaagaaggaggatgtgaactgagagtgaagttcagcaggagcgcagacgcccccgcgtacaagcagggccagaaccagctctataacgagctcaatctaggacgaagagaggagtacgatgttttggacaagagacgtggccgggaccctgagatggggggaaagccgagaaggaagaaccctcaggaaggcctgtacaatgaactgcagaaagataagatggcggaggcctacagtgagattgggatgaaaggcgagcgccggaggggcaaggggcacgatggcctttaccagggtctcagtacagccaccaaggacacctacgacgcccttcacatgcaggccctgccccctcgctgataa

SEQ ID NO: 677 - protein, 702 aa, synthetic construct
  REGION 1..702: note = C2 CAR IgD/FCHingeless/Y407R linker
EVQLVESGGGLVKPGGSLRLSCAASGFTFSGYAMSWVRQAPGKGLEWVSTISSGGTYIYYPDSVKGRFTISRDNAKNSLYLQMNSLRAEDTAVYYCARLGGDNYYEYFDVWGKGTTVTVSSGGGGSGGGGSGGGGSDIVLTQSPASLAVSPGQRATITCRASKSVSTSGYSYMHWYQQKPGQPPKLLIYLASNLESGVPARFSGSGSGTDFTLTINPVEANDTANYYCQHSRELPFTFGGGTKVEIKRTESPKAQASSVPTAQPQAEGSLAKATTAPATTRNTGRGGEEKKKEKEKEEQEERETKTPAPELLGGPSVFLFPPKPKDTLMISRTPEVTCVVVDVSHEDPEVKFNWYVDGVEVHNAKTKPREEQYNSTYRVVSVLTVLHQDWLNGKEYKCKVSNKALPAPIEKTISKAKGQPREPQVYTLPPSREEMTKNQVSLTCLVKGFYPSDIAVEWESNGQPENNYKTTPPVLDSDGSFFLRSKLTVDKSRWQQGNVFSCSVMHEALHNHYTQKSLSLSPGKIYIWAPLAGTCGVLLLSLVITLYCKRGRKKLLYIFKQPFMRPVQTTQEEDGCSCRFPEEEEGGCELRVKFSRSADAPAYKQGQNQLYNELNLGRREEYDVLDKRRGRDPEMGGKPRRKNPQEGLYNELQKDKMAEAYSEIGMKGERRRGKGHDGLYQGLSTATKDTYDALHMQALPPR

SEQ ID NO: 678 - DNA, 174 bp, synthetic construct; identical to SEQ ID NO: 357
  misc_feature 1..174: note = IgD linker
  source 1..174: mol_type = other DNA

SEQ ID NO: 679 - protein, 58 aa, synthetic construct; identical to SEQ ID NO: 358
  REGION 1..58: note = IgD linker

SEQ ID NO: 680 - DNA, 1461 bp, synthetic construct
  misc_feature 1..1461: note = C2 CAR IgD linker
  source 1..1461: mol_type = other DNA
gaggtgcagctggtggagtctgggggaggcctggtcaagcctggggggtccctgagactctcctgtgcagcctctggattcaccttcagtggctatgccatgagctgggtccgccaggctccagggaaggggctggagtgggtctcaaccattagtagtggcggaacctacatatactaccccgactcagtgaagggccgattcaccatctccagagacaacgccaagaactcactgtatctgcaaatgaacagcctgagagccgaggacacggccgtgtattactgtgcgagacttgggggggataattactacgaatacttcgatgtctggggcaaagggaccacggtcaccgtctcctccggcggtggcggatccggcggtggcggatccggcggtggcggatccgacattgtgctgacccagtctccagcctccttggccgtgtctccaggacagagggccaccatcacctgcagagccagtaagagtgtcagtaccagcggatactcctacatgcactggtatcagcagaaaccaggacaacctcctaaactcctgatttacctggcatccaatctggagagcggggtcccagccaggttcagcggcagtgggtctgggaccgatttcaccctcacaattaatcctgtggaagctaatgatactgcaaattattactgtcagcacagtagggagctgcctttcacattcggcggagggaccaaggtggagatcaaacgaactgagtctccaaaggcacaggcctcctcagtgcccactgcacaaccccaagcagagggcagcctcgccaaggcaaccacagccccagccaccacccgtaacacaggaagaggcggcgaagagaagaaaaaggagaaggagaaagaggaacaagaagagagagagacaaagacaccaatctacatctgggcgcccttggccgggacttgtggggtccttctcctgtcactggttatcaccctttactgcaaacggggcagaaagaaactcctgtatatattcaaacaaccatttatgagaccagtacaaactactcaagaggaagatggctgtagctgccgatttccagaagaagaagaaggaggatgtgaactgagagtgaagttcagcaggagcgcagacgcccccgcgtacaagcagggccagaaccagctctataacgagctcaatctaggacgaagagaggagtacgatgttttggacaagagacgtggccgggaccctgagatggggggaaagccgagaaggaagaaccctcaggaaggcctgtacaatgaactgcagaaagataagatggcggaggcctacagtgagattgggatgaaaggcgagcgccggaggggcaaggggcacgatggcctttaccagggtctcagtacagccaccaaggacacctacgacgcccttcacatgcaggccctgccccctcgctgataa

SEQ ID NO: 681 - protein, 485 aa, synthetic construct
  REGION 1..485: note = C2 CAR IgD linker
EVQLVESGGGLVKPGGSLRLSCAASGFTFSGYAMSWVRQAPGKGLEWVSTISSGGTYIYYPDSVKGRFTISRDNAKNSLYLQMNSLRAEDTAVYYCARLGGDNYYEYFDVWGKGTTVTVSSGGGGSGGGGSGGGGSDIVLTQSPASLAVSPGQRATITCRASKSVSTSGYSYMHWYQQKPGQPPKLLIYLASNLESGVPARFSGSGSGTDFTLTINPVEANDTANYYCQHSRELPFTFGGGTKVEIKRTESPKAQASSVPTAQPQAEGSLAKATTAPATTRNTGRGGEEKKKEKEKEEQEERETKTPIYIWAPLAGTCGVLLLSLVITLYCKRGRKKLLYIFKQPFMRPVQTTQEEDGCSCRFPEEEEGGCELRVKFSRSADAPAYKQGQNQLYNELNLGRREEYDVLDKRRGRDPEMGGKPRRKNPQEGLYNELQKDKMAEAYSEIGMKGERRRGKGHDGLYQGLSTATKDTYDALHMQALPPR

SEQ ID NO: 682 - DNA, 129 bp, synthetic construct; identical to SEQ ID NO: 359
  misc_feature 1..129: note = X4 linker
  source 1..129: mol_type = other DNA

SEQ ID NO: 683 - protein, 43 aa, synthetic construct; identical to SEQ ID NO: 360
  REGION 1..43: note = X4 linker

SEQ ID NO: 684 - DNA, 1416 bp, synthetic construct
  misc_feature 1..1416: note = C2 CAR X4 linker
  source 1..1416: mol_type = other DNA
gaggtgcagctggtggagtctgggggaggcctggtcaagcctggggggtccctgagactctcctgtgcagcctctggattcaccttcagtggctatgccatgagctgggtccgccaggctccagggaaggggctggagtgggtctcaaccattagtagtggcggaacctacatatactaccccgactcagtgaagggccgattcaccatctccagagacaacgccaagaactcactgtatctgcaaatgaacagcctgagagccgaggacacggccgtgtattactgtgcgagacttgggggggataattactacgaatacttcgatgtctggggcaaagggaccacggtcaccgtctcctccggcggtggcggatccggcggtggcggatccggcggtggcggatccgacattgtgctgacccagtctccagcctccttggccgtgtctccaggacagagggccaccatcacctgcagagccagtaagagtgtcagtaccagcggatactcctacatgcactggtatcagcagaaaccaggacaacctcctaaactcctgatttacctggcatccaatctggagagcggggtcccagccaggttcagcggcagtgggtctgggaccgatttcaccctcacaattaatcctgtggaagctaatgatactgcaaattattactgtcagcacagtagggagctgcctttcacattcggcggagggaccaaggtggagatcaaacgaactgacaagacgcacaccaagccacctaaaccagctccagaactgctcggaggtcctggcaccggaaccggaggacctaccatcaaaccacctaagccacctaagcctgctcctaacctgctcggaggacctatctacatctgggcgcccttggccgggacttgtggggtccttctcctgtcactggttatcaccctttactgcaaacggggcagaaagaaactcctgtatatattcaaacaaccatttatgagaccagtacaaactactcaagaggaagatggctgtagctgccgatttccagaagaagaagaaggaggatgtgaactgagagtgaagttcagcaggagcgcagacgcccccgcgtacaagcagggccagaaccagctctataacgagctcaatctaggacgaagagaggagtacgatgttttggacaagagacgtggccgggaccctgagatggggggaaagccgagaaggaagaaccctcaggaaggcctgtacaatgaactgcagaaagataagatggcggaggcctacagtgagattgggatgaaaggcgagcgccggaggggcaaggggcacgatggcctttaccagggtctcagtacagccaccaaggacacctacgacgcccttcacatgcaggccctgccccctcgctgataa

SEQ ID NO: 685 - protein, 470 aa, synthetic construct
  REGION 1..470: note = C2 CAR X4 linker
EVQLVESGGGLVKPGGSLRLSCAASGFTFSGYAMSWVRQAPGKGLEWVSTISSGGTYIYYPDSVKGRFTISRDNAKNSLYLQMNSLRAEDTAVYYCARLGGDNYYEYFDVWGKGTTVTVSSGGGGSGGGGSGGGGSDIVLTQSPASLAVSPGQRATITCRASKSVSTSGYSYMHWYQQKPGQPPKLLIYLASNLESGVPARFSGSGSGTDFTLTINPVEANDTANYYCQHSRELPFTFGGGTKVEIKRTDKTHTKPPKPAPELLGGPGTGTGGPTIKPPKPPKPAPNLLGGPIYIWAPLAGTCGVLLLSLVITLYCKRGRKKLLYIFKQPFMRPVQTTQEEDGCSCRFPEEEEGGCELRVKFSRSADAPAYKQGQNQLYNELNLGRREEYDVLDKRRGRDPEMGGKPRRKNPQEGLYNELQKDKMAEAYSEIGMKGERRRGKGHDGLYQGLSTATKDTYDALHMQALPPR

SEQ ID NO: 686 - DNA, 729 bp, synthetic construct
  misc_feature 1..729: note = OKT3 scFv
  source 1..729: mol_type = other DNA
caggtgcagctggtgcagagcggaggcggagtggtgcagcctggaagaagcctgcgcctgagctgcaaagcgagcggctatacctttacccgctataccatgcattgggtgcgccaggcgccgggcaaaggcctggaatggattggctatattaacccgagccgcggctataccaactataaccagaaagtgaaagatcgctttaccattagcaccgataaaagcaaaagcaccgcgtttctgcagatggatagcctgcgcccggaagataccgcggtgtattattgcgcgcgctattatgatgatcattattgcctggattattggggccagggcaccaccctgaccgtgagcagcggcggtggcggatccggcggtggcggatccggcggtggcggatccgatattcagatgacccagagcccgagcagcctgagcgcgagcgtgggcgatcgcgtgaccattacctgcagcgcgagcagcagcgtgagctatatgaactggtatcagcagaccccgggcaaagcgccgaaacgctggatttatgataccagcaaactggcgagcggcgtgccgagccgctttagcggcagcggcagcggcaccgattatacctttaccattagcagcctgcagccggaagatattgcgacctattattgccagcagtggagcagcaacccgtttacctttggccagggcaccaaactgcagattacccgctgataa

SEQ ID NO: 687 - protein, 241 aa, synthetic construct; identical to SEQ ID NO: 388
  REGION 1..241: note = OKT3 scFv

SEQ ID NO: 688 - DNA, 2187 bp, synthetic construct
  misc_feature 1..2187: note = C2-FC-OKT3
  source 1..2187: mol_type = other DNA
gaggtgcagctggtggagtctgggggaggcctggtcaagcctggggggtccctgagactctcctgtgcagcctctggattcaccttcagtggctatgccatgagctgggtccgccaggctccagggaaggggctggagtgggtctcaaccattagtagtggcggaacctacatatactaccccgactcagtgaagggccgattcaccatctccagagacaacgccaagaactcactgtatctgcaaatgaacagcctgagagccgaggacacggccgtgtattactgtgcgagacttgggggggataattactacgaatacttcgatgtctggggcaaagggaccacggtcaccgtctcctccggcggtggcggatccggcggtggcggatccggcggtggcggatccgacattgtgctgacccagtctccagcctccttggccgtgtctccaggacagagggccaccatcacctgcagagccagtaagagtgtcagtaccagcggatactcctacatgcactggtatcagcagaaaccaggacaacctcctaaactcctgatttacctggcatccaatctggagagcggggtcccagccaggttcagcggcagtgggtctgggaccgatttcaccctcacaattaatcctgtggaagctaatgatactgcaaattattactgtcagcacagtagggagctgcctttcacattcggcggagggaccaaggtggagatcaaacgaactgagcccaaatcttgtgacaaaactcacacatgcccaccgtgcccagcacctgaactcctggggggaccgtcagtcttcctcttccccccaaaacccaaggacaccctcatgatctcccggacccctgaggtcacatgcgtggtggtggacgtgagccacgaagaccctgaggtcaagttcaactggtacgtggacggcgtggaggtgcataatgccaagacaaagccgcgggaggagcagtacaacagcacgtaccgtgtggtcagcgtcctcaccgtcctgcaccaggactggctgaatggcaaggagtacaagtgcaaggtctccaacaaagccctcccagcccccatcgagaaaaccatctccaaagccaaagggcagccccgagaaccacaggtgtacaccctgcccccatcccgggaggagatgaccaagaaccaggtcagcctgacctgcctggtcaaaggcttctatcccagcgacatcgccgtggagtgggagagcaatgggcagccggagaacaactacaagaccacgcctcccgtgctggactccgacggctccttcttcctctacagcaagctcaccgtggacaagagcaggtggcagcaggggaacgtcttctcatgctccgtgatgcatgaggctctgcacaaccactacacgcagaagagcctctccctgtctccgggtaaaggcggtggcggatcccaggtgcagctggtgcagagcggaggcggagtggtgcagcctggaagaagcctgcgcctgagctgcaaagcgagcggctatacctttacccgctataccatgcattgggtgcgccaggcgccgggcaaaggcctggaatggattggctatattaacccgagccgcggctataccaactataaccagaaagtgaaagatcgctttaccattagcaccgataaaagcaaaagcaccgcgtttctgcagatggatagcctgcgcccggaagataccgcggtgtattattgcgcgcgctattatgatgatcattattgcctggattattggggccagggcaccaccctgaccgtgagcagcggcggtggcggatccggcggtggcggatccggcggtggcggatccgatattcagatgacccagagcccgagcagcctgagcgcgagcgtgggcgatcgcgtgaccattacctgcagcgcgagcagcagcgtgagctatatgaactggtatcagcagaccccgggcaaagcgccgaaacgctggatttatgataccagcaaactggcgagcggcgtgccgagccgctttagcggcagcggcagcggcaccgattatacctttaccattagcagcctgcagccggaagatattgcgacctattattgccagcagtggagcagcaacccgtttacctttggccagggcaccaaactgcagattacccgctgataa

SEQ ID NO: 689 - protein, 727 aa, synthetic construct
  REGION 1..727: note = C2-FC-OKT3
EVQLVESGGGLVKPGGSLRLSCAASGFTFSGYAMSWVRQAPGKGLEWVSTISSGGTYIYYPDSVKGRFTISRDNAKNSLYLQMNSLRAEDTAVYYCARLGGDNYYEYFDVWGKGTTVTVSSGGGGSGGGGSGGGGSDIVLTQSPASLAVSPGQRATITCRASKSVSTSGYSYMHWYQQKPGQPPKLLIYLASNLESGVPARFSGSGSGTDFTLTINPVEANDTANYYCQHSRELPFTFGGGTKVEIKRTEPKSCDKTHTCPPCPAPELLGGPSVFLFPPKPKDTLMISRTPEVTCVVVDVSHEDPEVKFNWYVDGVEVHNAKTKPREEQYNSTYRVVSVLTVLHQDWLNGKEYKCKVSNKALPAPIEKTISKAKGQPREPQVYTLPPSREEMTKNQVSLTCLVKGFYPSDIAVEWESNGQPENNYKTTPPVLDSDGSFFLYSKLTVDKSRWQQGNVFSCSVMHEALHNHYTQKSLSLSPGKGGGGSQVQLVQSGGGVVQPGRSLRLSCKASGYTFTRYTMHWVRQAPGKGLEWIGYINPSRGYTNYNQKVKDRFTISTDKSKSTAFLQMDSLRPEDTAVYYCARYYDDHYCLDYWGQGTTLTVSSGGGGSGGGGSGGGGSDIQMTQSPSSLSASVGDRVTITCSASSSVSYMNWYQQTPGKAPKRWIYDTSKLASGVPSRFSGSGSGTDYTFTISSLQPEDIATYYCQQWSSNPFTFGQGTKLQITR

SEQ ID NO: 690 - DNA, 2361 bp, synthetic construct
  misc_feature 1..2361: note = C2-IgD/FC-OKT3
  source 1..2361: mol_type = other DNA
gaggtgcagctggtggagtctgggggaggcctggtcaagcctggggggtccctgagactctcctgtgcagcctctggattcaccttcagtggctatgccatgagctgggtccgccaggctccagggaaggggctggagtgggtctcaaccattagtagtggcggaacctacatatactaccccgactcagtgaagggccgattcaccatctccagagacaacgccaagaactcactgtatctgcaaatgaacagcctgagagccgaggacacggccgtgtattactgtgcgagacttgggggggataattactacgaatacttcgatgtctggggcaaagggaccacggtcaccgtctcctccggcggtggcggatccggcggtggcggatccggcggtggcggatccgacattgtgctgacccagtctccagcctccttggccgtgtctccaggacagagggccaccatcacctgcagagccagtaagagtgtcagtaccagcggatactcctacatgcactggtatcagcagaaaccaggacaacctcctaaactcctgatttacctggcatccaatctggagagcggggtcccagccaggttcagcggcagtgggtctgggaccgatttcaccctcacaattaatcctgtggaagctaatgatactgcaaattattactgtcagcacagtagggagctgcctttcacattcggcggagggaccaaggtggagatcaaacgaactgagtctccaaaggcacaggcctcctcagtgcccactgcacaaccccaagcagagggcagcctcgccaaggcaaccacagccccagccaccacccgtaacacaggaagaggcggcgaagagaagaaaaaggagaaggagaaagaggaacaagaagagagagagacaaagacaccagagcccaaatcttgtgacaaaactcacacatgcccaccgtgcccagcacctgaactcctggggggaccgtcagtcttcctcttccccccaaaacccaaggacaccctcatgatctcccggacccctgaggtcacatgcgtggtggtggacgtgagccacgaagaccctgaggtcaagttcaactggtacgtggacggcgtggaggtgcataatgccaagacaaagccgcgggaggagcagtacaacagcacgtaccgtgtggtcagcgtcctcaccgtcctgcaccaggactggctgaatggcaaggagtacaagtgcaaggtctccaacaaagccctcccagcccccatcgagaaaaccatctccaaagccaaagggcagccccgagaaccacaggtgtacaccctgcccccatcccgggaggagatgaccaagaaccaggtcagcctgacctgcctggtcaaaggcttctatcccagcgacatcgccgtggagtgggagagcaatgggcagccggagaacaactacaagaccacgcctcccgtgctggactccgacggctccttcttcctctacagcaagctcaccgtggacaagagcaggtggcagcaggggaacgtcttctcatgctccgtgatgcatgaggctctgcacaaccactacacgcagaagagcctctccctgtctccgggtaaaggcggtggcggatcccaggtgcagctggtgcagagcggaggcggagtggtgcagcctggaagaagcctgcgcctgagctgcaaagcgagcggctatacctttacccgctataccatgcattgggtgcgccaggcgccgggcaaaggcctggaatggattggctatattaacccgagccgcggctataccaactataaccagaaagtgaaagatcgctttaccattagcaccgataaaagcaaaagcaccgcgtttctgcagatggatagcctgcgcccggaagataccgcggtgtattattgcgcgcgctattatgatgatcattattgcctggattattggggccagggcaccaccctgaccgtgagcagcggcggtggcggatccggcggtggcggatccggcggtggcggatccgatattcagatgacccagagcccgagcagcctgagcgcgagcgtgggcgatcgcgtgaccattacctgcagcgcgagcagcagcgtgagctatatgaactggtatcagcagaccccgggcaaagcgccgaaacgctggatttatgataccagcaaactggcgagcggcgtgccgagccgctttagcggcagcggcagcggcaccgattatacctttaccattagcagcctgcagccggaagatattgcgacctattattgccagcagtggagcagcaacccgtttacctttggccagggcaccaaactgcagattacccgctgataa

SEQ ID NO: 691 - protein, 785 aa, synthetic construct
  REGION 1..785: note = C2-IgD/FC-OKT3
EVQLVESGGGLVKPGGSLRLSCAASGFTFSGYAMSWVRQAPGKGLEWVSTISSGGTYIYYPDSVKGRFTISRDNAKNSLYLQMNSLRAEDTAVYYCARLGGDNYYEYFDVWGKGTTVTVSSGGGGSGGGGSGGGGSDIVLTQSPASLAVSPGQRATITCRASKSVSTSGYSYMHWYQQKPGQPPKLLIYLASNLESGVPARFSGSGSGTDFTLTINPVEANDTANYYCQHSRELPFTFGGGTKVEIKRTESPKAQASSVPTAQPQAEGSLAKATTAPATTRNTGRGGEEKKKEKEKEEQEERETKTPEPKSCDKTHTCPPCPAPELLGGPSVFLFPPKPKDTLMISRTPEVTCVVVDVSHEDPEVKFNWYVDGVEVHNAKTKPREEQYNSTYRVVSVLTVLHQDWLNGKEYKCKVSNKALPAPIEKTISKAKGQPREPQVYTLPPSREEMTKNQVSLTCLVKGFYPSDIAVEWESNGQPENNYKTTPPVLDSDGSFFLYSKLTVDKSRWQQGNVFSCSVMHEALHNHYTQKSLSLSPGKGGGGSQVQLVQSGGGVVQPGRSLRLSCKASGYTFTRYTMHWVRQAPGKGLEWIGYINPSRGYTNYNQKVKDRFTISTDKSKSTAFLQMDSLRPEDTAVYYCARYYDDHYCLDYWGQGTTLTVSSGGGGSGGGGSGGGGSDIQMTQSPSSLSASVGDRVTITCSASSSVSYMNWYQQTPGKAPKRWIYDTSKLASGVPSRFSGSGSGTDYTFTISSLQPEDIATYYCQQWSSNPFTFGQGTKLQITR

SEQ ID NO: 692 - DNA, 2142 bp, synthetic construct
  misc_feature 1..2142: note = C2-FCHingeless/Y407R-OKT3
  source 1..2142: mol_type = other DNA
gaggtgcagctggtggagtctgggggaggcctggtcaagcctggggggtccctgagactctcctgtgcagcctctggattcaccttcagtggctatgccatgagctgggtccgccaggctccagggaaggggctggagtgggtctcaaccattagtagtggcggaacctacatatactaccccgactcagtgaagggccgattcaccatctccagagacaacgccaagaactcactgtatctgcaaatgaacagcctgagagccgaggacacggccgtgtattactgtgcgagacttgggggggataattactacgaatacttcgatgtctggggcaaagggaccacggtcaccgtctcctccggcggtggcggatccggcggtggcggatccggcggtggcggatccgacattgtgctgacccagtctccagcctccttggccgtgtctccaggacagagggccaccatcacctgcagagccagtaagagtgtcagtaccagcggatactcctacatgcactggtatcagcagaaaccaggacaacctcctaaactcctgatttacctggcatccaatctggagagcggggtcccagccaggttcagcggcagtgggtctgggaccgatttcaccctcacaattaatcctgtggaagctaatgatactgcaaattattactgtcagcacagtagggagctgcctttcacattcggcggagggaccaaggtggagatcaaacgaactgcacctgaactcctggggggaccgtcagtcttcctcttccccccaaaacccaaggacaccctcatgatctcccggacccctgaggtcacatgcgtggtggtggacgtgagccacgaagaccctgaggtcaagttcaactggtacgtggacggcgtggaggtgcataatgccaagacaaagccgcgggaggagcagtacaacagcacgtaccgtgtggtcagcgtcctcaccgtcctgcaccaggactggctgaatggcaaggagtacaagtgcaaggtctccaacaaagccctcccagcccccatcgagaaaaccatctccaaagccaaagggcagccccgagaaccacaggtgtacaccctgcccccatcccgggaggagatgaccaagaaccaggtcagcctgacctgcctggtcaaaggcttctatcccagcgacatcgccgtggagtgggagagcaatgggcagccggagaacaactacaagaccacgcctcccgtgctggactccgacggctccttcttcctcaggagcaagctcaccgtggacaagagcaggtggcagcaggggaacgtcttctcatgctccgtgatgcatgaggctctgcacaaccactacacgcagaagagcctctccctgtctccgggtaaaggcggtggcggatcccaggtgcagctggtgcagagcggaggcggagtggtgcagcctggaagaagcctgcgcctgagctgcaaagcgagcggctatacctttacccgctataccatgcattgggtgcgccaggcgccgggcaaaggcctggaatggattggctatattaacccgagccgcggctataccaactataaccagaaagtgaaagatcgctttaccattagcaccgataaaagcaaaagcaccgcgtttctgcagatggatagcctgcgcccggaagataccgcggtgtattattgcgcgcgctattatgatgatcattattgcctggattattggggccagggcaccaccctgaccgtgagcagcggcggtggcggatccggcggtggcggatccggcggtggcggatccgatattcagatgacccagagcccgagcagcctgagcgcgagcgtgggcgatcgcgtgaccattacctgcagcgcgagcagcagcgtgagctatatgaactggtatcagcagaccccgggcaaagcgccgaaacgctggatttatgataccagcaaactggcgagcggcgtgccgagccgctttagcggcagcggcagcggcaccgattatacctttaccattagcagcctgcagccggaagatattgcgacctattattgccagcagtggagcagcaacccgtttacctttggccagggcaccaaactgcagattacccgctgataa

SEQ ID NO: 693 - protein, 712 aa, synthetic construct
  REGION 1..712: note = C2-FCHingeless/Y407R-OKT3
EVQLVESGGGLVKPGGSLRLSCAASGFTFSGYAMSWVRQAPGKGLEWVSTISSGGTYIYYPDSVKGRFTISRDNAKNSLYLQMNSLRAEDTAVYYCARLGGDNYYEYFDVWGKGTTVTVSSGGGGSGGGGSGGGGSDIVLTQSPASLAVSPGQRATITCRASKSVSTSGYSYMHWYQQKPGQPPKLLIYLASNLESGVPARFSGSGSGTDFTLTINPVEANDTANYYCQHSRELPFTFGGGTKVEIKRTAPELLGGPSVFLFPPKPKDTLMISRTPEVTCVVVDVSHEDPEVKFNWYVDGVEVHNAKTKPREEQYNSTYRVVSVLTVLHQDWLNGKEYKCKVSNKALPAPIEKTISKAKGQPREPQVYTLPPSREEMTKNQVSLTCLVKGFYPSDIAVEWESNGQPENNYKTTPPVLDSDGSFFLRSKLTVDKSRWQQGNVFSCSVMHEALHNHYTQKSLSLSPGKGGGGSQVQLVQSGGGVVQPGRSLRLSCKASGYTFTRYTMHWVRQAPGKGLEWIGYINPSRGYTNYNQKVKDRFTISTDKSKSTAFLQMDSLRPEDTAVYYCARYYDDHYCLDYWGQGTTLTVSSGGGGSGGGGSGGGGSDIQMTQSPSSLSASVGDRVTITCSASSSVSYMNWYQQTPGKAPKRWIYDTSKLASGVPSRFSGSGSGTDYTFTISSLQPEDIATYYCQQWSSNPFTFGQGTKLQITR

SEQ ID NO: 694 - DNA, 2316 bp, synthetic construct
  misc_feature 1..2316: note = C2-IgD/FCHingeless/Y407R-OKT3
  source 1..2316: mol_type = other DNA
gaggtgcagctggtggagtctgggggaggcctggtcaagcctggggggtccctgagactctcctgtgcagcctctggattcaccttcagtggctatgccatgagctgggtccgccaggctccagggaaggggctggagtgggtctcaaccattagtagtggcggaacctacatatactaccccgactcagtgaagggccgattcaccatctccagagacaacgccaagaactcactgtatctgcaaatgaacagcctgagagccgaggacacggccgtgtattactgtgcgagacttgggggggataattactacgaatacttcgatgtctggggcaaagggaccacggtcaccgtctcctccggcggtggcggatccggcggtggcggatccggcggtggcggatccgacattgtgctgacccagtctccagcctccttggccgtgtctccaggacagagggccaccatcacctgcagagccagtaagagtgtcagtaccagcggatactcctacatgcactggtatcagcagaaaccaggacaacctcctaaactcctgatttacctggcatccaatctggagagcggggtcccagccaggttcagcggcagtgggtctgggaccgatttcaccctcacaattaatcctgtggaagctaatgatactgcaaattattactgtcagcacagtagggagctgcctttcacattcggcggagggaccaaggtggagatcaaacgaactgagtctccaaaggcacaggcctcctcagtgcccactgcacaaccccaagcagagggcagcctcgccaaggcaaccacagccccagccaccacccgtaacacaggaagaggcggcgaagagaagaaaaaggagaaggagaaagaggaacaagaagagagagagacaaagacaccagcacctgaactcctggggggaccgtcagtcttcctcttccccccaaaacccaaggacaccctcatgatctcccggacccctgaggtcacatgcgtggtggtggacgtgagccacgaagaccctgaggtcaagttcaactggtacgtggacggcgtggaggtgcataatgccaagacaaagccgcgggaggagcagtacaacagcacgtaccgtgtggtcagcgtcctcaccgtcctgcaccaggactggctgaatggcaaggagtacaagtgcaaggtctccaacaaagccctcccagcccccatcgagaaaaccatctccaaagccaaagggcagccccgagaaccacaggtgtacaccctgcccccatcccgggaggagatgaccaagaaccaggtcagcctgacctgcctggtcaaaggcttctatcccagcgacatcgccgtggagtgggagagcaatgggcagccggagaacaactacaagaccacgcctcccgtgctggactccgacggctccttcttcctcaggagcaagctcaccgtggacaagagcaggtggcagcaggggaacgtcttctcatgctccgtgatgcatgaggctctgcacaaccactacacgcagaagagcctctccctgtctccgggtaaaggcggtggcggatcccaggtgcagctggtgcagagcggaggcggagtggtgcagcctggaagaagcctgcgcctgagctgcaaagcgagcggctatacctttacccgctataccatgcattgggtgcgccaggcgccgggcaaaggcctggaatggattggctatattaacccgagccgcggctataccaactataaccagaaagtgaaagatcgctttaccattagcaccgataaaagcaaaagcaccgcgtttctgcagatggatagcctgcgcccggaagataccgcggtgtattattgcgcgcgctattatgatgatcattattgcctggattattggggccagggcaccaccctgaccgtgagcagcggcggtggcggatccggcggtggcggatccggcggtggcggatccgatattcagatgacccagagcccgagcagcctgagcgcgagcgtgggcgatcgcgtgaccattacctgcagcgcgagcagcagcgtgagctatatgaactggtatcagcagaccccgggcaaagcgccgaaacgctggatttatgataccagcaaactggcgagcggcgtgccgagccgctttagcggcagcggcagcggcaccgattatacctttaccattagcagcctgcagccggaagatattgcgacctattattgccagcagtggagcagcaacccgtttacctttggccagggcaccaaactgcagattacccgctgataa

SEQ ID NO: 695 - protein, 770 aa, synthetic construct
  REGION 1..770: note = C2-IgD/FCHingeless/Y407R-OKT3
EVQLVESGGGLVKPGGSLRLSCAASGFTFSGYAMSWVRQAPGKGLEWVSTISSGGTYIYYPDSVKGRFTISRDNAKNSLYLQMNSLRAEDTAVYYCARLGGDNYYEYFDVWGKGTTVTVSSGGGGSGGGGSGGGGSDIVLTQSPASLAVSPGQRATITCRASKSVSTSGYSYMHWYQQKPGQPPKLLIYLASNLESGVPARFSGSGSGTDFTLTINPVEANDTANYYCQHSRELPFTFGGGTKVEIKRTESPKAQASSVPTAQPQAEGSLAKATTAPATTRNTGRGGEEKKKEKEKEEQEERETKTPAPELLGGPSVFLFPPKPKDTLMISRTPEVTCVVVDVSHEDPEVKFNWYVDGVEVHNAKTKPREEQYNSTYRVVSVLTVLHQDWLNGKEYKCKVSNKALPAPIEKTISKAKGQPREPQVYTLPPSREEMTKNQVSLTCLVKGFYPSDIAVEWESNGQPENNYKTTPPVLDSDGSFFLRSKLTVDKSRWQQGNVFSCSVMHEALHNHYTQKSLSLSPGKGGGGSQVQLVQSGGGVVQPGRSLRLSCKASGYTFTRYTMHWVRQAPGKGLEWIGYINPSRGYTNYNQKVKDRFTISTDKSKSTAFLQMDSLRPEDTAVYYCARYYDDHYCLDYWGQGTTLTVSSGGGGSGGGGSGGGGSDIQMTQSPSSLSASVGDRVTITCSASSSVSYMNWYQQTPGKAPKRWIYDTSKLASGVPSRFSGSGSGTDYTFTISSLQPEDIATYYCQQWSSNPFTFGQGTKLQITR

SEQ ID NO: 696 - DNA, 1665 bp, synthetic construct
  misc_feature 1..1665: note = C2-IgD-OKT3
  source 1..1665: mol_type = other DNA
gaggtgcagctggtggagtctgggggaggcctggtcaagcctggggggtccctgagactctcctgtgcagcctctggattcaccttcagtggctatgccatgagctgggtccgccaggctccagggaaggggctggagtgggtctcaaccattagtagtggcggaacctacatatactaccccgactcagtgaagggccgattcaccatctccagagacaacgccaagaactcactgtatctgcaaatgaacagcctgagagccgaggacacggccgtgtattactgtgcgagacttgggggggataattactacgaatacttcgatgtctggggcaaagggaccacggtcaccgtctcctccggcggtggcggatccggcggtggcggatccggcggtggcggatccgacattgtgctgacccagtctccagcctccttggccgtgtctccaggacagagggccaccatcacctgcagagccagtaagagtgtcagtaccagcggatactcctacatgcactggtatcagcagaaaccaggacaacctcctaaactcctgatttacctggcatccaatctggagagcggggtcccagccaggttcagcggcagtgggtctgggaccgatttcaccctcacaattaatcctgtggaagctaatgatactgcaaattattactgtcagcacagtagggagctgcctttcacattcggcggagggaccaaggtggagatcaaacgaactgagtctccaaaggcacaggcctcctcagtgcccactgcacaaccccaagcagagggcagcctcgccaaggcaaccacagccccagccaccacccgtaacacaggaagaggcggcgaagagaagaaaaaggagaaggagaaagaggaacaagaagagagagagacaaagacaccaggcggtggcggatcccaggtgcagctggtgcagagcggaggcggagtggtgcagcctggaagaagcctgcgcctgagctgcaaagcgagcggctatacctttacccgctataccatgcattgggtgcgccaggcgccgggcaaaggcctggaatggattggctatattaacccgagccgcggctataccaactataaccagaaagtgaaagatcgctttaccattagcaccgataaaagcaaaagcaccgcgtttctgcagatggatagcctgcgcccggaagataccgcggtgtattattgcgcgcgctattatgatgatcattattgcctggattattggggccagggcaccaccctgaccgtgagcagcggcggtggcggatccggcggtggcggatccggcggtggcggatccgatattcagatgacccagagcccgagcagcctgagcgcgagcgtgggcgatcgcgtgaccattacctgcagcgcgagcagcagcgtgagctatatgaactggtatcagcagaccccgggcaaagcgccgaaacgctggatttatgataccagcaaactggcgagcggcgtgccgagccgctttagcggcagcggcagcggcaccgattatacctttaccattagcagcctgcagccggaagatattgcgacctattattgccagcagtggagcagcaacccgtttacctttggccagggcaccaaactgcagattacccgctgataa

SEQ ID NO: 697 - protein, 553 aa, synthetic construct
  REGION 1..553: note = C2-IgD-OKT3
EVQLVESGGGLVKPGGSLRLSCAASGFTFSGYAMSWVRQAPGKGLEWVSTISSGGTYIYYPDSVKGRFTISRDNAKNSLYLQMNSLRAEDTAVYYCARLGGDNYYEYFDVWGKGTTVTVSSGGGGSGGGGSGGGGSDIVLTQSPASLAVSPGQRATITCRASKSVSTSGYSYMHWYQQKPGQPPKLLIYLASNLESGVPARFSGSGSGTDFTLTINPVEANDTANYYCQHSRELPFTFGGGTKVEIKRTESPKAQASSVPTAQPQAEGSLAKATTAPATTRNTGRGGEEKKKEKEKEEQEERETKTPGGGGSQVQLVQSGGGVVQPGRSLRLSCKASGYTFTRYTMHWVRQAPGKGLEWIGYINPSRGYTNYNQKVKDRFTISTDKSKSTAFLQMDSLRPEDTAVYYCARYYDDHYCLDYWGQGTTLTVSSGGGGSGGGGSGGGGSDIQMTQSPSSLSASVGDRVTITCSASSSVSYMNWYQQTPGKAPKRWIYDTSKLASGVPSRFSGSGSGTDYTFTISSLQPEDIATYYCQQWSSNPFTFGQGTKLQITR

SEQ ID NO: 698 - DNA, 1620 bp, synthetic construct
  misc_feature 1..1620: note = C2-X4-OKT3
  source 1..1620: mol_type = other DNA
gaggtgcagctggtggagtctgggggaggcctggtcaagcctggggggtccctgagactctcctgtgcagcctctggattcaccttcagtggctatgccatgagctgggtccgccaggctccagggaaggggctggagtgggtctcaaccattagtagtggcggaacctacatatactaccccgactcagtgaagggccgattcaccatctccagagacaacgccaagaactcactgtatctgcaaatgaacagcctgagagccgaggacacggccgtgtattactgtgcgagacttgggggggataattactacgaatacttcgatgtctggggcaaagggaccacggtcaccgtctcctccggcggtggcggatccggcggtggcggatccggcggtggcggatccgacattgtgctgacccagtctccagcctccttggccgtgtctccaggacagagggccaccatcacctgcagagccagtaagagtgtcagtaccagcggatactcctacatgcactggtatcagcagaaaccaggacaacctcctaaactcctgatttacctggcatccaatctggagagcggggtcccagccaggttcagcggcagtgggtctgggaccgatttcaccctcacaattaatcctgtggaagctaatgatactgcaaattattactgtcagcacagtagggagctgcctttcacattcggcggagggaccaaggtggagatcaaacgaactgacaagacgcacaccaagccacctaaaccagctccagaactgctcggaggtcctggcaccggaaccggaggacctaccatcaaaccacctaagccacctaagcctgctcctaacctgctcggaggacctggcggtggcggatcccaggtgcagctggtgcagagcggaggcggagtggtgcagcctggaagaagcctgcgcctgagctgcaaagcgagcggctatacctttacccgctataccatgcattgggtgcgccaggcgccgggcaaaggcctggaatggattggctatattaacccgagccgcggctataccaactataaccagaaagtgaaagatcgctttaccattagcaccgataaaagcaaaagcaccgcgtttctgcagatggatagcctgcgcccggaagataccgcggtgtattattgcgcgcgctattatgatgatcattattgcctggattattggggccagggcaccaccctgaccgtgagcagcggcggtggcggatccggcggtggcggatccggcggtggcggatccgatattcagatgacccagagcccgagcagcctgagcgcgagcgtgggcgatcgcgtgaccattacctgcagcgcgagcagcagcgtgagctatatgaactggtatcagcagaccccgggcaaagcgccgaaacgctggatttatgataccagcaaactggcgagcggcgtgccgagccgctttagcggcagcggcagcggcaccgattatacctttaccattagcagcctgcagccggaagatattgcgacctattattgccagcagtggagcagcaacccgtttacctttggccagggcaccaaactgcagattacccgctgataa

SEQ ID NO: 699 - protein, 538 aa, synthetic construct
  REGION 1..538: note = C2-X4-OKT3
EVQLVESGGGLVKPGGSLRLSCAASGFTFSGYAMSWVRQAPGKGLEWVSTISSGGTYIYYPDSVKGRFTISRDNAKNSLYLQMNSLRAEDTAVYYCARLGGDNYYEYFDVWGKGTTVTVSSGGGGSGGGGSGGGGSDIVLTQSPASLAVSPGQRATITCRASKSVSTSGYSYMHWYQQKPGQPPKLLIYLASNLESGVPARFSGSGSGTDFTLTINPVEANDTANYYCQHSRELPFTFGGGTKVEIKRTDKTHTKPPKPAPELLGGPGTGTGGPTIKPPKPPKPAPNLLGGPGGGGSQVQLVQSGGGVVQPGRSLRLSCKASGYTFTRYTMHWVRQAPGKGLEWIGYINPSRGYTNYNQKVKDRFTISTDKSKSTAFLQMDSLRPEDTAVYYCARYYDDHYCLDYWGQGTTLTVSSGGGGSGGGGSGGGGSDIQMTQSPSSLSASVGDRVTITCSASSSVSYMNWYQQTPGKAPKRWIYDTSKLASGVPSRFSGSGSGTDYTFTISSLQPEDIATYYCQQWSSNPFTFGQGTKLQITR

SEQ ID NO: 700 - DNA, 2910 bp, synthetic construct
  misc_feature 1..2910: note = C2-MMP9
  source 1..2910: mol_type = other DNA
gaggtgcagctggtggagtctgggggaggcctggtcaagcctggggggtccctgagactctcctgtgcagcctctggattcaccttcagtggctatgccatgagctgggtccgccaggctccagggaaggggctggagtgggtctcaaccattagtagtggcggaacctacatatactaccccgactcagtgaagggccgattcaccatctccagagacaacgccaagaactcactgtatctgcaaatgaacagcctgagagccgaggacacggccgtgtattactgtgcgagacttgggggggataattactacgaatacttcgatgtctggggcaaagggaccacggtcaccgtctcctccggcggtggcggatccggcggtggcggatccggcggtggcggatccgacattgtgctgacccagtctccagcctccttggccgtgtctccaggacagagggccaccatcacctgcagagccagtaagagtgtcagtaccagcggatactcctacatgcactggtatcagcagaaaccaggacaacctcctaaactcctgatttacctggcatccaatctggagagcggggtcccagccaggttcagcggcagtgggtctgggaccgatttcaccctcacaattaatcctgtggaagctaatgatactgcaaattattactgtcagcacagtagggagctgcctttcacattcggcggagggaccaaggtggagatcaaacgaactggcggtggcggatccagcctctggcagcccctggtcctggtgctcctggtgctgggctgctgctttgctgcccccagacagcgccagtccacccttgtgctcttccctggagacctgagaaccaatctcaccgacaggcagctggcagaggaatacctgtaccgctatggttacactcgggtggcagagatgcgtggagagtcgaaatctctggggcctgcgctgctgcttctccagaagcaactgtccctgcccgagaccggtgagctggatagcgccacgctgaaggccatgcgaaccccacggtgcggggtcccagacctgggcagattccaaacctttgagggcgacctcaagtggcaccaccacaacatcacctattggatccaaaactactcggaagacttgccgcgggcggtgattgacgacgcctttgcccgcgccttcgcactgtggagcgcggtgacgccgctcaccttcactcgcgtgtacagccgggacgcagacatcgtcatccagtttggtgtcgcggagcacggagacgggtatcccttcgacgggaaggacgggctcctggcacacgcctttcctcctggccccggcattcagggagacgcccatttcgacgatgacgagttgtggtccctgggcaagggcgtcgtggttccaactcggtttggaaacgcagatggcgcggcctgccacttccccttcatcttcgagggccgctcctactctgcctgcaccaccgacggtcgctccgacggcttgccctggtgcagtaccacggccaactacgacaccgacgaccggtttggcttctgccccagcgagagactctacacccaggacggcaatgctgatgggaaaccctgccagtttccattcatcttccaaggccaatcctactccgcctgcaccacggacggtcgctccgacggctaccgctggtgcgccaccaccgccaactacgaccgggacaagctcttcggcttctgcccgacccgagctgactcgacggtgatggggggcaactcggcgggggagctgtgcgtcttccccttcactttcctgggtaaggagtactcgacctgtaccagcgagggccgcggagatgggcgcctctggtgcgctaccacctcgaactttgacagcgacaagaagtggggcttctgcccggaccaaggatacagtttgttcctcgtggcggcgcatgagttcggccacgcgctgggcttagatcattcctcagtgccggaggcgctcatgtaccctatgtaccgcttcactgaggggccccccttgcataaggacgacgtgaatggcatccggcacctctatggtcctcgccctgaacctgagccacggcctccaaccaccaccacaccgcagcccacggctcccccgacggtctgccccaccggaccccccactgtccacccctcagagcgccccacagctggccccacaggtcccccctcagctggccccacaggtccccccactgctggcccttctacggccactactgtgcctttgagtccggtggacgatgcctgcaacgtgaacatcttcgacgccatcgcggagattgggaaccagctgtatttgttcaaggatgggaagtactggcgattctctgagggcagggggagccggccgcagggccccttccttatcgccgacaagtggcccgcgctgccccgcaagctggactcggtctttgaggagcggctctccaagaagcttttcttcttctctgggcgccaggtgtgggtgtacacaggcgcgtcggtgctgggcccgaggcgtctggacaagctgggcctgggagccgacgtggcccaggtgaccggggccctccggagtggcagggggaagatgctgctgttcagcgggcggcgcctctggaggttcgacgtgaaggcgcagatggtggatccccggagcgccagcgaggtggaccggatgttccccggggtgcctttggacacgcacgacgtcttccagtaccgagagaaagcctatttctgccaggaccgcttctactggcgcgtgagttcccggagtgagttgaaccaggtggaccaagtgggctacgtgacctatgacatcctgcagtgccctgaggacgattacaaggatgacgacgataagtgataa

SEQ ID NO: 701 - protein, 968 aa, synthetic construct
  REGION 1..968: note = C2-MMP9
EVQLVESGGGLVKPGGSLRLSCAASGFTFSGYAMSWVRQAPGKGLEWVSTISSGGTYIYYPDSVKGRFTISRDNAKNSLYLQMNSLRAEDTAVYYCARLGGDNYYEYFDVWGKGTTVTVSSGGGGSGGGGSGGGGSDIVLTQSPASLAVSPGQRATITCRASKSVSTSGYSYMHWYQQKPGQPPKLLIYLASNLESGVPARFSGSGSGTDFTLTINPVEANDTANYYCQHSRELPFTFGGGTKVEIKRTGGGGSSLWQPLVLVLLVLGCCFAAPRQRQSTLVLFPGDLRTNLTDRQLAEEYLYRYGYTRVAEMRGESKSLGPALLLLQKQLSLPETGELDSATLKAMRTPRCGVPDLGRFQTFEGDLKWHHHNITYWIQNYSEDLPRAVIDDAFARAFALWSAVTPLTFTRVYSRDADIVIQFGVAEHGDGYPFDGKDGLLAHAFPPGPGIQGDAHFDDDELWSLGKGVVVPTRFGNADGAACHFPFIFEGRSYSACTTDGRSDGLPWCSTTANYDTDDRFGFCPSERLYTQDGNADGKPCQFPFIFQGQSYSACTTDGRSDGYRWCATTANYDRDKLFGFCPTRADSTVMGGNSAGELCVFPFTFLGKEYSTCTSEGRGDGRLWCATTSNFDSDKKWGFCPDQGYSLFLVAAHEFGHALGLDHSSVPEALMYPMYRFTEGPPLHKDDVNGIRHLYGPRPEPEPRPPTTTTPQPTAPPTVCPTGPPTVHPSERPTAGPTGPPSAGPTGPPTAGPSTATTVPLSPVDDACNVNIFDAIAEIGNQLYLFKDGKYWRFSEGRGSRPQGPFLIADKWPALPRKLDSVFEERLSKKLFFFSGRQVWVYTGASVLGPRRLDKLGLGADVAQVTGALRSGRGKMLLFSGRRLWRFDVKAQMVDPRSASEVDRMFPGVPLDTHDVFQYREKAYFCQDRFYWRVSSRSELNQVDQVGYVTYDILQCPEDDYKDDDDK

SEQ ID NO: 702 - DNA, 1821 bp, synthetic construct
  misc_feature 1..1821: note = C2-MMP9cat
  source 1..1821: mol_type = other DNA
gaggtgcagctggtggagtctgggggaggcctggtcaagcctggggggtccctgagactctcctgtgcagcctctggattcaccttcagtggctatgccatgagctgggtccgccaggctccagggaaggggctggagtgggtctcaaccattagtagtggcggaacctacatatactaccccgactcagtgaagggccgattcaccatctccagagacaacgccaagaactcactgtatctgcaaatgaacagcctgagagccgaggacacggccgtgtattactgtgcgagacttgggggggataattactacgaatacttcgatgtctggggcaaagggaccacggtcaccgtctcctccggcggtggcggatccggcggtggcggatccggcggtggcggatccgacattgtgctgacccagtctccagcctccttggccgtgtctccaggacagagggccaccatcacctgcagagccagtaagagtgtcagtaccagcggatactcctacatgcactggtatcagcagaaaccaggacaacctcctaaactcctgatttacctggcatccaatctggagagcggggtcccagccaggttcagcggcagtgggtctgggaccgatttcaccctcacaattaatcctgtggaagctaatgatactgcaaattattactgtcagcacagtagggagctgcctttcacattcggcggagggaccaaggtggagatcaaacgaactggcggtggcggatccttccaaacctttgagggcgacctcaagtggcaccaccacaacatcacctattggatccaaaactactcggaagacttgccgcgggcggtgattgacgacgcctttgcccgcgccttcgcactgtggagcgcggtgacgccgctcaccttcactcgcgtgtacagccgggacgcagacatcgtcatccagtttggtgtcgcggagcacggagacgggtatcccttcgacgggaaggacgggctcctggcacacgcctttcctcctggccccggcattcagggagacgcccatttcgacgatgacgagttgtggtccctgggcaagggcgtcgtggttccaactcggtttggaaacgcagatggcgcggcctgccacttccccttcatcttcgagggccgctcctactctgcctgcaccaccgacggtcgctccgacggcttgccctggtgcagtaccacggccaactacgacaccgacgaccggtttggcttctgccccagcgagagactctacacccaggacggcaatgctgatgggaaaccctgccagtttccattcatcttccaaggccaatcctactccgcctgcaccacggacggtcgctccgacggctaccgctggtgcgccaccaccgccaactacgaccgggacaagctcttcggcttctgcccgacccgagctgactcgacggtgatggggggcaactcggcgggggagctgtgcgtcttccccttcactttcctgggtaaggagtactcgacctgtaccagcgagggccgcggagatgggcgcctctggtgcgctaccacctcgaactttgacagcgacaagaagtggggcttctgcccggaccaaggatacagtttgttcctcgtggcggcgcatgagttcggccacgcgctgggcttagatcattcctcagtgccggaggcgctcatgtaccctatgtaccgcttcactgaggggccccccttgcataaggacgacgtgaatggcatccggcacctctatggtcctcgccctgaacctgattacaaggatgacgacgataagtgataa

SEQ ID NO: 703 - protein, 605 aa, synthetic construct
  REGION 1..605: note = C2-MMP9cat
EVQLVESGGGLVKPGGSLRLSCAASGFTFSGYAMSWVRQAPGKGLEWVSTISSGGTYIYYPDSVKGRFTISRDNAKNSLYLQMNSLRAEDTAVYYCARLGGDNYYEYFDVWGKGTTVTVSSGGGGSGGGGSGGGGSDIVLTQSPASLAVSPGQRATITCRASKSVSTSGYSYMHWYQQKPGQPPKLLIYLASNLESGVPARFSGSGSGTDFTLTINPVEANDTANYYCQHSRELPFTFGGGTKVEIKRTGGGGSFQTFEGDLKWHHHNITYWIQNYSEDLPRAVIDDAFARAFALWSAVTPLTFTRVYSRDADIVIQFGVAEHGDGYPFDGKDGLLAHAFPPGPGIQGDAHFDDDELWSLGKGVVVPTRFGNADGAACHFPFIFEGRSYSACTTDGRSDGLPWCSTTANYDTDDRFGFCPSERLYTQDGNADGKPCQFPFIFQGQSYSACTTDGRSDGYRWCATTANYDRDKLFGFCPTRADSTVMGGNSAGELCVFPFTFLGKEYSTCTSEGRGDGRLWCATTSNFDSDKKWGFCPDQGYSLFLVAAHEFGHALGLDHSSVPEALMYPMYRFTEGPPLHKDDVNGIRHLYGPRPEPDYKDDDDK

SEQ ID NO: 704 - DNA, 30 bp, synthetic construct
  misc_feature 1..30: note = [G4S1]x2 linker sequence:
  source 1..30: mol_type = other DNA
ggcggtggcggatccggcggtggcggatcc

SEQ ID NO: 705 - protein, 10 aa, synthetic construct
  REGION 1..10: note = [G4S1]x2 linker sequence:
GGGGSGGGGS

SEQ ID NO: 706 - DNA, 45 bp, synthetic construct; identical to SEQ ID NO: 401
  misc_feature 1..45: note = [G4S1]x3 linker sequence:
  source 1..45: mol_type = other DNA

SEQ ID NO: 707 - protein, 15 aa, synthetic construct
  REGION 1..15: note = [G4S1]x3 linker sequence:
GGGGSGGGGSGGGGS

SEQ ID NO: 708 - DNA, 66 bp, synthetic construct; identical to SEQ ID NO: 409
  misc_feature 1..66: note = Long GS linker sequence:
  source 1..66: mol_type = other DNA

SEQ ID NO: 709 - protein, 22 aa, synthetic construct
  REGION 1..22: note = Long GS linker sequence
GGGSGGGGSGSGGSGGGGSGGG

SEQ ID NO: 710 - DNA, 39 bp, synthetic construct; identical to SEQ ID NO: 407
  misc_feature 1..39: note = 13 aa GS linker sequence
  source 1..39: mol_type = other DNA

SEQ ID NO: 711 - protein, 13 aa, synthetic construct
  REGION 1..13: note = 13 aa GS linker sequence
GGGSGGGGSGGGS

SEQ ID NO: 712 - DNA, 24 bp, synthetic construct
  misc_feature 1..24: note = 8 aa GS linker sequence
  source 1..24: mol_type = other DNA
ggcggttccggcggtggatccgga

SEQ ID NO: 713 - protein, 8 aa, synthetic construct
  REGION 1..8: note = 8 aa GS linker sequence
GGSGGGSG

SEQ ID NO: 714 - DNA, 39 bp, synthetic construct; identical to SEQ ID NO: 405
  misc_feature 1..39: note = 12 aa GS linker sequence
  source 1..39: mol_type = other DNA

SEQ ID NO: 715 - protein, 12 aa, synthetic construct
  REGION 1..12: note = 12 aa GS linker sequence
GGSGGGSGGGSG

SEQ ID NO: 716 - DNA, 78 bp, synthetic construct; identical to SEQ ID NO: 411
  misc_feature 1..78: note = 24 aa GS linker sequence
  source 1..78: mol_type = other DNA

SEQ ID NO: 717 - protein, 24 aa, synthetic construct
  REGION 1..24: note = 24 aa GS linker sequence
GGSGGGSGGGSGGGSGGGSGGGSG

SEQ ID NO: 718 - DNA, 1485 bp, synthetic construct
  misc_feature 1..1485: note = CAR-T C2 CD8/CD8/4-1BB/CD3z CAR44
  source 1..1485: mol_type = other DNA
atggccttaccagtgaccgccttgctcctgccgctggccttgctgctccacgccgccaggccggaggtgcagctggtggagtctgggggaggcctggtcaagcctggggggtccctgagactctcctgtgcagcctctggattcaccttcagtggctatgccatgagctgggtccgccaggctccagggaaggggctggagtgggtctcaaccattagtagtggcggaacctacatatactaccccgactcagtgaagggccgattcaccatctccagagacaacgccaagaactcactgtatctgcaaatgaacagcctgagagccgaggacacggccgtgtattactgtgcgagacttgggggggataattactacgaatacttcgatgtctggggcaaagggaccacggtcaccgtctcctccggcggtggcggatccggcggtggcggatccggcggtggcggatccgacattgtgctgacccagtctccagcctccttggccgtgtctccaggacagagggccaccatcacctgcagagccagtaagagtgtcagtaccagcggatactcctacatgcactggtatcagcagaaaccaggacaacctcctaaactcctgatttacctggcatccaatctggagagcggggtcccagccaggttcagcggcagtgggtctgggaccgatttcaccctcacaattaatcctgtggaagctaatgatactgcaaattattactgtcagcacagtagggagctgcctttcacattcggcggagggaccaaggtggagatcaaacgaactacaacaacccctgcccccagacctcctaccccagcccctacaattgccagccagcctctgagcctgaggcccgaggcttgtagacctgctgctggcggagccgtgcacaccagaggactggatttcgcctgcgacatctacatctgggcgcccttggccgggacttgtggggtccttctcctgtcactggttatcaccctttactgcaaacggggcagaaagaaactcctgtatatattcaaacaaccatttatgagaccagtacaaactactcaagaggaagatggctgtagctgccgatttccagaagaagaagaaggaggatgtgaactgagagtgaagttcagcaggagcgcagacgcccccgcgtacaagcagggccagaaccagctctataacgagctcaatctaggacgaagagaggagtacgatgttttggacaagagacgtggccgggaccctgagatggggggaaagccgagaaggaagaaccctcaggaaggcctgtacaatgaactgcagaaagataagatggcggaggcctacagtgagattgggatgaaaggcgagcgccggaggggcaaggggcacgatggcctttaccagggtctcagtacagccaccaaggacacctacgacgcccttcacatgcaggccctgccccctcgctgataa

SEQ ID NO: 719 - protein, 493 aa, synthetic construct; identical to SEQ ID NO: 611
  REGION 1..493: note = CAR-T C2 CD8/CD8/4-1BB/CD3z CAR44

SEQ ID NO: 720 - DNA, 1482 bp, synthetic construct
  misc_feature 1..1482: note = CAR-T IgK C2 CD8/CD8/4-1BB/CD3z CAR45
  source 1..1482: mol_type = other DNA
atggagacagacacactcctgctatgggtactgctgctctgggttccaggttccactggtgaggtgcagctggtggagtctgggggaggcctggtcaagcctggggggtccctgagactctcctgtgcagcctctggattcaccttcagtggctatgccatgagctgggtccgccaggctccagggaaggggctggagtgggtctcaaccattagtagtggcggaacctacatatactaccccgactcagtgaagggccgattcaccatctccagagacaacgccaagaactcactgtatctgcaaatgaacagcctgagagccgaggacacggccgtgtattactgtgcgagacttgggggggataattactacgaatacttcgatgtctggggcaaagggaccacggtcaccgtctcctccggcggtggcggatccggcggtggcggatccggcggtggcggatccgacattgtgctgacccagtctccagcctccttggccgtgtctccaggacagagggccaccatcacctgcagagccagtaagagtgtcagtaccagcggatactcctacatgcactggtatcagcagaaaccaggacaacctcctaaactcctgatttacctggcatccaatctggagagcggggtcccagccaggttcagcggcagtgggtctgggaccgatttcaccctcacaattaatcctgtggaagctaatgatactgcaaattattactgtcagcacagtagggagctgcctttcacattcggcggagggaccaaggtggagatcaaacgaactacaacaacccctgcccccagacctcctaccccagcccctacaattgccagccagcctctgagcctgaggcccgaggcttgtagacctgctgctggcggagccgtgcacaccagaggactggatttcgcctgcgacatctacatctgggcgcccttggccgggacttgtggggtccttctcctgtcactggttatcaccctttactgcaaacggggcagaaagaaactcctgtatatattcaaacaaccatttatgagaccagtacaaactactcaagaggaagatggctgtagctgccgatttccagaagaagaagaaggaggatgtgaactgagagtgaagttcagcaggagcgcagacgcccccgcgtacaagcagggccagaaccagctctataacgagctcaatctaggacgaagagaggagtacgatgttttggacaagagacgtggccgggaccctgagatggggggaaagccgagaaggaagaaccctcaggaaggcctgtacaatgaactgcagaaagataagatggcggaggcctacagtgagattgggatgaaaggcgagcgccggaggggcaaggggcacgatggcctttaccagggtctcagtacagccaccaaggacacctacgacgcccttcacatgcaggccctgccccctcgctgataa

SEQ ID NO: 721 - protein, 492 aa, synthetic construct
  REGION 1..492: note = CAR-T IgK C2 CD8/CD8/4-1BB/CD3z CAR45
METDTLLLWVLLLWVPGSTGEVQLVESGGGLVKPGGSLRLSCAASGFTFSGYAMSWVRQAPGKGLEWVSTISSGGTYIYYPDSVKGRFTISRDNAKNSLYLQMNSLRAEDTAVYYCARLGGDNYYEYFDVWGKGTTVTVSSGGGGSGGGGSGGGGSDIVLTQSPASLAVSPGQRATITCRASKSVSTSGYSYMHWYQQKPGQPPKLLIYLASNLESGVPARFSGSGSGTDFTLTINPVEANDTANYYCQHSRELPFTFGGGTKVEIKRTTTTPAPRPPTPAPTIASQPLSLRPEACRPAAGGAVHTRGLDFACDIYIWAPLAGTCGVLLLSLVITLYCKRGRKKLLYIFKQPFMRPVQTTQEEDGCSCRFPEEEEGGCELRVKFSRSADAPAYKQGQNQLYNELNLGRREEYDVLDKRRGRDPEMGGKPRRKNPQEGLYNELQKDKMAEAYSEIGMKGERRRGKGHDGLYQGLSTATKDTYDALHMQALPPR

SEQ ID NO: 722 - DNA, 1485 bp, synthetic construct
  misc_feature 1..1485: note = CAR-T C2 op CD8/CD8/4-1BB/CD3z CAR46
  source 1..1485: mol_type = other DNA
atggccttaccagtgaccgccttgctcctgccgctggccttgctgctccacgccgccaggccggaagtgcagctggtggaatctggcggcggactcgtgaagcctggcggctctctgagactgagctgtgccgccagcggcttcacctttagcggctacgccatgagctgggtgcgccaggctcctggcaaaggcctggaatgggtgtccaccatctctagcggcggcacctacatctactaccccgacagcgtgaagggccggttcaccatcagccgggacaacgccaagaacagcctgtacctgcagatgaactccctgcgggccgaggacaccgccgtgtactattgtgctagactgggcggcgacaactactacgagtacttcgacgtgtggggcaagggcaccaccgtgacagtgtctagcggaggcggaggatcaggcggcggaggaagtggcggagggggatctgatatcgtgctgacccagagccctgccagcctggctgtgtctcctggacagagggccaccatcacctgtcgggccagcaagagcgtgtccacctccggctacagctacatgcactggtatcagcagaagcccggccagccccccaagctgctgatctacctggccagcaacctggaaagcggcgtgcccgctagattttccggctctggcagcggcaccgacttcaccctgaccatcaaccccgtggaagccaacgacaccgccaattactactgccagcacagcagagagctgcccttcaccttcggcggaggcaccaaggtggaaatcaagcggaccacaacaacccctgcccccagacctcctaccccagcccctacaattgccagccagcctctgagcctgaggcccgaggcttgtagacctgctgctggcggagccgtgcacaccagaggactggatttcgcctgcgacatctacatctgggcgcccttggccgggacttgtggggtccttctcctgtcactggttatcaccctttactgcaaacggggcagaaagaaactcctgtatatattcaaacaaccatttatgagaccagtacaaactactcaagaggaagatggctgtagctgccgatttccagaagaagaagaaggaggatgtgaactgagagtgaagttcagcaggagcgcagacgcccccgcgtacaagcagggccagaaccagctctataacgagctcaatctaggacgaagagaggagtacgatgttttggacaagagacgtggccgggaccctgagatggggggaaagccgagaaggaagaaccctcaggaaggcctgtacaatgaactgcagaaagataagatggcggaggcctacagtgagattgggatgaaaggcgagcgccggaggggcaaggggcacgatggcctttaccagggtctcagtacagccaccaaggacacctacgacgcccttcacatgcaggccctgccccctcgctgataa

SEQ ID NO: 723 - protein, 493 aa, synthetic construct; identical to SEQ ID NO: 611
  REGION 1..493: note = CAR-T C2 op CD8/CD8/4-1BB/CD3z CAR46

SEQ ID NO: 724 - DNA, 1482 bp, synthetic construct
  misc_feature 1..1482: note = CAR-T IgK C2 op CD8/CD8/4-1BB/CD3z CAR47
  source 1..1482: mol_type = other DNA
atggagacagacacactcctgctatgggtactgctgctctgggttccaggttccactggtgaagtgcagctggtggaatctggcggcggactcgtgaagcctggcggctctctgagactgagctgtgccgccagcggcttcacctttagcggctacgccatgagctgggtgcgccaggctcctggcaaaggcctggaatgggtgtccaccatctctagcggcggcacctacatctactaccccgacagcgtgaagggccggttcaccatcagccgggacaacgccaagaacagcctgtacctgcagatgaactccctgcgggccgaggacaccgccgtgtactattgtgctagactgggcggcgacaactactacgagtacttcgacgtgtggggcaagggcaccaccgtgacagtgtctagcggaggcggaggatcaggcggcggaggaagtggcggagggggatctgatatcgtgctgacccagagccctgccagcctggctgtgtctcctggacagagggccaccatcacctgtcgggccagcaagagcgtgtccacctccggctacagctacatgcactggtatcagcagaagcccggccagccccccaagctgctgatctacctggccagcaacctggaaagcggcgtgcccgctagattttccggctctggcagcggcaccgacttcaccctgaccatcaaccccgtggaagccaacgacaccgccaattactactgccagcacagcagagagctgcccttcaccttcggcggaggcaccaaggtggaaatcaagcggaccacaacaacccctgcccccagacctcctaccccagcccctacaattgccagccagcctctgagcctgaggcccgaggcttgtagacctgctgctggcggagccgtgcacaccagaggactggatttcgcctgcgacatctacatctgggcgcccttggccgggacttgtggggtccttctcctgtcactggttatcaccctttactgcaaacggggcagaaagaaactcctgtatatattcaaacaaccatttatgagaccagtacaaactactcaagaggaagatggctgtagctgccgatttccagaagaagaagaaggaggatgtgaactgagagtgaagttcagcaggagcgcagacgcccccgcgtacaagcagggccagaaccagctctataacgagctcaatctaggacgaagagaggagtacgatgttttggacaagagacgtggccgggaccctgagatggggggaaagccgagaaggaagaaccctcaggaaggcctgtacaatgaactgcagaaagataagatggcggaggcctacagtgagattgggatgaaaggcgagcgccggaggggcaaggggcacgatggcctttaccagggtctcagtacagccaccaaggacacctacgacgcccttcacatgcaggccctgccccctcgctgataa

SEQ ID NO: 725 - protein, 492 aa, synthetic construct; identical to SEQ ID NO: 721
  REGION 1..492: note = CAR-T IgK C2 op CD8/CD8/4-1BB/CD3z CAR47

SEQ ID NO: 726 - DNA, 1485 bp, synthetic construct
  misc_feature 1..1485: note = CAR-T C2 CD8/CD8/4-1BB/CD3z op CAR48
  source 1..1485: mol_type = other DNA
atggccttaccagtgaccgccttgctcctgccgctggccttgctgctccacgccgccaggccggaagtgcagctggtggaatctggcggcggactcgtgaagcctggcggctctctgagactgagctgtgccgccagcggcttcacctttagcggctacgccatgagctgggtgcgccaggctcctggcaaaggcctggaatgggtgtccaccatctctagcggcggcacctacatctactaccccgacagcgtgaagggccggttcaccatcagccgggacaacgccaagaacagcctgtacctgcagatgaactccctgcgggccgaggacaccgccgtgtactattgtgctagactgggcggcgacaactactacgagtacttcgacgtgtggggcaagggcaccaccgtgacagtgtctagcggaggcggaggatcaggcggcggaggaagtggcggagggggatctgatatcgtgctgacccagagccctgccagcctggctgtgtctcctggacagagggccaccatcacctgtcgggccagcaagagcgtgtccacctccggctacagctacatgcactggtatcagcagaagcccggccagccccccaagctgctgatctacctggccagcaacctggaaagcggcgtgcccgctagattttccggctctggcagcggcaccgacttcaccctgaccatcaaccccgtggaagccaacgacaccgccaattactactgccagcacagcagagagctgcccttcaccttcggcggaggcaccaaggtggaaatcaagcggaccacaacaacccctgcccccagacctcctaccccagcccctacaattgccagccagcctctgagcctgaggcccgaggcttgtagacctgctgctggcggagccgtgcacaccagaggactggatttcgcctgcgacatctacatctgggcccctctggccggcacatgtggcgtgctgctgctgagcctcgtgatcaccctgtactgcaagcggggcagaaagaagctgctgtacatcttcaagcagcccttcatgcggcccgtgcagaccacccaggaagaggacggctgctcctgcagattccccgaggaagaagaaggcggctgcgagctgagagtgaagttcagcagatccgccgacgcccctgcctacaagcagggccagaaccagctgtacaacgagctgaacctgggcagacgggaagagtacgacgtgctggacaagcggagaggcagggaccctgagatgggcggcaagcccagaagaaagaacccccaggaaggcctgtataacgaactgcagaaagacaagatggccgaggcctacagcgagatcggaatgaagggcgagcggagaagaggcaagggccacgatggcctgtaccagggcctgagcaccgccaccaaggacacctatgacgccctgcacatgcaggccctgcctcccagatgataa

SEQ ID NO: 727 - protein, 493 aa, synthetic construct; identical to SEQ ID NO: 611
  REGION 1..493: note = CAR-T C2 CD8/CD8/4-1BB/CD3z op CAR48

SEQ ID NO: 728 - DNA, 1482 bp, synthetic construct
  misc_feature 1..1482: note = CAR-T IgK C2 CD8/CD8/4-1BB/CD3z op CAR49
  source 1..1482: mol_type = other DNA
atggagacagacacactcctgctatgggtactgctgctctgggttccaggttccactggtgaagtgcagctggtggaatctggcggcggactcgtgaagcctggcggctctctgagactgagctgtgccgccagcggcttcacctttagcggctacgccatgagctgggtgcgccaggctcctggcaaaggcctggaatgggtgtccaccatctctagcggcggcacctacatctactaccccgacagcgtgaagggccggttcaccatcagccgggacaacgccaagaacagcctgtacctgcagatgaactccctgcgggccgaggacaccgccgtgtactattgtgctagactgggcggcgacaactactacgagtacttcgacgtgtggggcaagggcaccaccgtgacagtgtctagcggaggcggaggatcaggcggcggaggaagtggcggagggggatctgatatcgtgctgacccagagccctgccagcctggctgtgtctcctggacagagggccaccatcacctgtcgggccagcaagagcgtgtccacctccggctacagctacatgcactggtatcagcagaagcccggccagccccccaagctgctgatctacctggccagcaacctggaaagcggcgtgcccgctagattttccggctctggcagcggcaccgacttcaccctgaccatcaaccccgtggaagccaacgacaccgccaattactactgccagcacagcagagagctgcccttcaccttcggcggaggcaccaaggtggaaatcaagcggaccacaacaacccctgcccccagacctcctaccccagcccctacaattgccagccagcctctgagcctgaggcccgaggcttgtagacctgctgctggcggagccgtgcacaccagaggactggatttcgcctgcgacatctacatctgggcccctctggccggcacatgtggcgtgctgctgctgagcctcgtgatcaccctgtactgcaagcggggcagaaagaagctgctgtacatcttcaagcagcccttcatgcggcccgtgcagaccacccaggaagaggacggctgctcctgcagattccccgaggaagaagaaggcggctgcgagctgagagtgaagttcagcagatccgccgacgcccctgcctacaagcagggccagaaccagctgtacaacgagctgaacctgggcagacgggaagagtacgacgtgctggacaagcggagaggcagggaccctgagatgggcggcaagcccagaagaaagaacccccaggaaggcctgtataacgaactgcagaaagacaagatggccgaggcctacagcgagatcggaatgaagggcgagcggagaagaggcaagggccacgatggcctgtaccagggcctgagcaccgccaccaaggacacctatgacgccctgcacatgcaggccctgcctcccagatgataa

SEQ ID NO: 729 - protein, 492 aa, synthetic construct; identical to SEQ ID NO: 721
  REGION 1..492: note = CAR-T IgK C2 CD8/CD8/4-1BB/CD3z op CAR49

SEQ ID NO: 730 - DNA, 1410 bp, synthetic construct
  misc_feature 1..1410: note = CAR-T C2 CD4/CD4/4-1BB/CD3z CAR50
  source 1..1410: mol_type = other DNA
atggccttaccagtgaccgccttgctcctgccgctggccttgctgctccacgccgccaggccggaggtgcagctggtggagtctgggggaggcctggtcaagcctggggggtccctgagactctcctgtgcagcctctggattcaccttcagtggctatgccatgagctgggtccgccaggctccagggaaggggctggagtgggtctcaaccattagtagtggcggaacctacatatactaccccgactcagtgaagggccgattcaccatctccagagacaacgccaagaactcactgtatctgcaaatgaacagcctgagagccgaggacacggccgtgtattactgtgcgagacttgggggggataattactacgaatacttcgatgtctggggcaaagggaccacggtcaccgtctcctccggcggtggcggatccggcggtggcggatccggcggtggcggatccgacattgtgctgacccagtctccagcctccttggccgtgtctccaggacagagggccaccatcacctgcagagccagtaagagtgtcagtaccagcggatactcctacatgcactggtatcagcagaaaccaggacaacctcctaaactcctgatttacctggcatccaatctggagagcggggtcccagccaggttcagcggcagtgggtctgggaccgatttcaccctcacaattaatcctgtggaagctaatgatactgcaaattattactgtcagcacagtagggagctgcctttcacattcggcggagggaccaaggtggagatcaaacgaacttcgggacaggtcctgctggaatccaacatcaaggttctgcccacatggtccaccccggtgcagccaatggccctgattgtgctggggggcgtcgccggcctcctgcttttcattgggctaggcatcttcttcaaacggggcagaaagaaactcctgtatatattcaaacaaccatttatgagaccagtacaaactactcaagaggaagatggctgtagctgccgatttccagaagaagaagaaggaggatgtgaactgagagtgaagttcagcaggagcgcagacgcccccgcgtacaagcagggccagaaccagctctataacgagctcaatctaggacgaagagaggagtacgatgttttggacaagagacgtggccgggaccctgagatggggggaaagccgagaaggaagaaccctcaggaaggcctgtacaatgaactgcagaaagataagatggcggaggcctacagtgagattgggatgaaaggcgagcgccggaggggcaaggggcacgatggcctttaccagggtctcagtacagccaccaaggacacctacgacgcccttcacatgcaggccctgccccctcgctgataa

SEQ ID NO: 731 - protein, 468 aa, synthetic construct
  REGION 1..468: note = CAR-T C2 CD4/CD4/4-1BB/CD3z CAR50
MALPVTALLLPLALLLHAARPEVQLVESGGGLVKPGGSLRLSCAASGFTFSGYAMSWVRQAPGKGLEWVSTISSGGTYIYYPDSVKGRFTISRDNAKNSLYLQMNSLRAEDTAVYYCARLGGDNYYEYFDVWGKGTTVTVSSGGGGSGGGGSGGGGSDIVLTQSPASLAVSPGQRATITCRASKSVSTSGYSYMHWYQQKPGQPPKLLIYLASNLESGVPARFSGSGSGTDFTLTINPVEANDTANYYCQHSRELPFTFGGGTKVEIKRTSGQVLLESNIKVLPTWSTPVQPMALIVLGGVAGLLLFIGLGIFFKRGRKKLLYIFKQPFMRPVQTTQEEDGCSCRFPEEEEGGCELRVKFSRSADAPAYKQGQNQLYNELNLGRREEYDVLDKRRGRDPEMGGKPRRKNPQEGLYNELQKDKMAEAYSEIGMKGERRRGKGHDGLYQGLSTATKDTYDALHMQALPPR

SEQ ID NO: 732 - DNA, 2046 bp, synthetic construct
  misc_feature 1..2046: note = CAR-T C2 FC/CD8/4-1BB/CD3z "Fc" CAR53
  source 1..2046: mol_type = other DNA
atggccttaccagtgaccgccttgctcctgccgctggccttgctgctccacgccgccaggccggaggtgcagctggtggagtctgggggaggcctggtcaagcctggggggtccctgagactctcctgtgcagcctctggattcaccttcagtggctatgccatgagctgggtccgccaggctccagggaaggggctggagtgggtctcaaccattagtagtggcggaacctacatatactaccccgactcagtgaagggccgattcaccatctccagagacaacgccaagaactcactgtatctgcaaatgaacagcctgagagccgaggacacggccgtgtattactgtgcgagacttgggggggataattactacgaatacttcgatgtctggggcaaagggaccacggtcaccgtctcctccggcggtggcggatccggcggtggcggatccggcggtggcggatccgacattgtgctgacccagtctccagcctccttggccgtgtctccaggacagagggccaccatcacctgcagagccagtaagagtgtcagtaccagcggatactcctacatgcactggtatcagcagaaaccaggacaacctcctaaactcctgatttacctggcatccaatctggagagcggggtcccagccaggttcagcggcagtgggtctgggaccgatttcaccctcacaattaatcctgtggaagctaatgatactgcaaattattactgtcagcacagtagggagctgcctttcacattcggcggagggaccaaggtggagatcaaacgaactgagcccaaatcttgtgacaaaactcacacatgcccaccgtgcccagcacctgaactcctggggggaccgtcagtcttcctcttccccccaaaacccaaggacaccctcatgatctcccggacccctgaggtcacatgcgtggtggtggacgtgagccacgaagaccctgaggtcaagttcaactggtacgtggacggcgtggaggtgcataatgccaagacaaagccgcgggaggagcagtacaacagcacgtaccgtgtggtcagcgtcctcaccgtcctgcaccaggactggctgaatggcaaggagtacaagtgcaaggtctccaacaaagccctcccagcccccatcgagaaaaccatctccaaagccaaagggcagccccgagaaccacaggtgtacaccctgcccccatcccgggaggagatgaccaagaaccaggtcagcctgacctgcctggtcaaaggcttctatcccagcgacatcgccgtggagtgggagagcaatgggcagccggagaacaactacaagaccacgcctcccgtgctggactccgacggctccttcttcctctacagcaagctcaccgtggacaagagcaggtggcagcaggggaacgtcttctcatgctccgtgatgcatgaggctctgcacaaccactacacgcagaagagcctctccctgtctccgggtaaaatctacatctgggcgcccttggccgggacttgtggggtccttctcctgtcactggttatcaccctttactgcaaacggggcagaaagaaactcctgtatatattcaaacaaccatttatgagaccagtacaaactactcaagaggaagatggctgtagctgccgatttccagaagaagaagaaggaggatgtgaactgagagtgaagttcagcaggagcgcagacgcccccgcgtacaagcagggccagaaccagctctataacgagctcaatctaggacgaagagaggagtacgatgttttggacaagagacgtggccgggaccctgagatggggggaaagccgagaaggaagaaccctcaggaaggcctgtacaatgaactgcagaaagataagatggcggaggcctacagtgagattgggatgaaaggcgagcgccggaggggcaaggggcacgatggcctttaccagggtctcagtacagccaccaaggacacctacgacgcccttcacatgcaggccctgccccctcgctgataa

SEQ ID NO: 733 - protein, 680 aa, synthetic construct
  REGION 1..680: note = CAR-T C2 FC/CD8/4-1BB/CD3z "Fc" CAR53
MALPVTALLLPLALLLHAARPEVQLVESGGGLVKPGGSLRLSCAASGFTFSGYAMSWVRQAPGKGLEWVSTISSGGTYIYYPDSVKGRFTISRDNAKNSLYLQMNSLRAEDTAVYYCARLGGDNYYEYFDVWGKGTTVTVSSGGGGSGGGGSGGGGSDIVLTQSPASLAVSPGQRATITCRASKSVSTSGYSYMHWYQQKPGQPPKLLIYLASNLESGVPARFSGSGSGTDFTLTINPVEANDTANYYCQHSRELPFTFGGGTKVEIKRTEPKSCDKTHTCPPCPAPELLGGPSVFLFPPKPKDTLMISRTPEVTCVVVDVSHEDPEVKFNWYVDGVEVHNAKTKPREEQYNSTYRVVSVLTVLHQDWLNGKEYKCKVSNKALPAPIEKTISKAKGQPREPQVYTLPPSREEMTKNQVSLTCLVKGFYPSDIAVEWESNGQPENNYKTTPPVLDSDGSFFLYSKLTVDKSRWQQGNVFSCSVMHEALHNHYTQKSLSLSPGKIYIWAPLAGTCGVLLLSLVITLYCKRGRKKLLYIFKQPFMRPVQTTQEEDGCSCRFPEEEEGGCELRVKFSRSADAPAYKQGQNQLYNELNLGRREEYDVLDKRRGRDPEMGGKPRRKNPQEGLYNELQKDKMAEAYSEIGMKGERRRGKGHDGLYQGLSTATKDTYDALHMQALPPR

SEQ ID NO: 734 - DNA, 2220 bp, synthetic construct
  misc_feature 1..2220: note = CAR-T C2 IgD/FC/CD8/4-1BB/CD3z "IgD-Fc" CAR54
  source 1..2220: mol_type = other DNA
atggccttaccagtgaccgccttgctcctgccgctggccttgctgctccacgccgccaggccggaggtgcagctggtggagtctgggggaggcctggtcaagcctggggggtccctgagactctcctgtgcagcctctggattcaccttcagtggctatgccatgagctgggtccgccaggctccagggaaggggctggagtgggtctcaaccattagtagtggcggaacctacatatactaccccgactcagtgaagggccgattcaccatctccagagacaacgccaagaactcactgtatctgcaaatgaacagcctgagagccgaggacacggccgtgtattactgtgcgagacttgggggggataattactacgaatacttcgatgtctggggcaaagggaccacggtcaccgtctcctccggcggtggcggatccggcggtggcggatccggcggtggcggatccgacattgtgctgacccagtctccagcctccttggccgtgtctccaggacagagggccaccatcacctgcagagccagtaagagtgtcagtaccagcggatactcctacatgcactggtatcagcagaaaccaggacaacctcctaaactcctgatttacctggcatccaatctggagagcggggtcccagccaggttcagcggcagtgggtctgggaccgatttcaccctcacaattaatcctgtggaagctaatgatactgcaaattattactgtcagcacagtagggagctgcctttcacattcggcggagggaccaaggtggagatcaaacgaactgagtctccaaaggcacaggcctcctcagtgcccactgcacaaccccaagcagagggcagcctcgccaaggcaaccacagccccagccaccacccgtaacacaggaagaggcggcgaagagaagaaaaaggagaaggagaaagaggaacaagaagagagagagacaaagacaccagagcccaaatcttgtgacaaaactcacacatgcccaccgtgcccagcacctgaactcctggggggaccgtcagtcttcctcttccccccaaaacccaaggacaccctcatgatctcccggacccctgaggtcacatgcgtggtggtggacgtgagccacgaagaccctgaggtcaagttcaactggtacgtggacggcgtggaggtgcataatgccaagacaaagccgcgggaggagcagtacaacagcacgtaccgtgtggtcagcgtcctcaccgtcctgcaccaggactggctgaatggcaaggagtacaagtgcaaggtctccaacaaagccctcccagcccccatcgagaaaaccatctccaaagccaaagggcagccccgagaaccacaggtgtacaccctgcccccatcccgggaggagatgaccaagaaccaggtcagcctgacctgcctggtcaaaggcttctatcccagcgacatcgccgtggagtgggagagcaatgggcagccggagaacaactacaagaccacgcctcccgtgctggactccgacggctccttcttcctctacagcaagctcaccgtggacaagagcaggtggcagcaggggaacgtcttctcatgctccgtgatgcatgaggctctgcacaaccactacacgcagaagagcctctccctgtctccgggtaaaatctacatctgggcgcccttggccgggacttgtggggtccttctcctgtcactggttatcaccctttactgcaaacggggcagaaagaaactcctgtatatattcaaacaaccatttatgagaccagtacaaactactcaagaggaagatggctgtagctgccgatttccagaagaagaagaaggaggatgtgaactgagagtgaagttcagcaggagcgcagacgcccccgcgtacaagcagggccagaaccagctctataacgagctcaatctaggacgaagagaggagtacgatgttttggacaagagacgtggccgggaccctgagatggggggaaagccgagaaggaagaaccctcaggaaggcctgtacaatgaactgcagaaagataagatggcggaggcctacagtgagattgggatgaaaggcgagcgccggaggggcaaggggcacgatggcctttaccagggtctcagtacagccaccaaggacacctacgacgcccttcacatgcaggccctgccccctcgctgataa

SEQ ID NO: 735 - protein, 738 aa, synthetic construct
  REGION 1..738: note = CAR-T C2 IgD/FC/CD8/4-1BB/CD3z "IgD-Fc" CAR54
MALPVTALLLPLALLLHAARPEVQLVESGGGLVKPGGSLRLSCAASGFTFSGYAMSWVRQAPGKGLEWVSTISSGGTYIYYPDSVKGRFTISRDNAKNSLYLQMNSLRAEDTAVYYCARLGGDNYYEYFDVWGKGTTVTVSSGGGGSGGGGSGGGGSDIVLTQSPASLAVSPGQRATITCRASKSVSTSGYSYMHWYQQKPGQPPKLLIYLASNLESGVPARFSGSGSGTDFTLTINPVEANDTANYYCQHSRELPFTFGGGTKVEIKRTESPKAQASSVPTAQPQAEGSLAKATTAPATTRNTGRGGEEKKKEKEKEEQEERETKTPEPKSCDKTHTCPPCPAPELLGGPSVFLFPPKPKDTLMISRTPEVTCVVVDVSHEDPEVKFNWYVDGVEVHNAKTKPREEQYNSTYRVVSVLTVLHQDWLNGKEYKCKVSNKALPAPIEKTISKAKGQPREPQVYTLPPSREEMTKNQVSLTCLVKGFYPSDIAVEWESNGQPENNYKTTPPVLDSDGSFFLYSKLTVDKSRWQQGNVFSCSVMHEALHNHYTQKSLSLSPGKIYIWAPLAGTCGVLLLSLVITLYCKRGRKKLLYIFKQPFMRPVQTTQEEDGCSCRFPEEEEGGCELRVKFSRSADAPAYKQGQNQLYNELNLGRREEYDVLDKRRGRDPEMGGKPRRKNPQEGLYNELQKDKMAEAYSEIGMKGERRRGKGHDGLYQGLSTATKDTYDALHMQALPPR

SEQ ID NO: 736 - DNA, 2001 bp, synthetic construct
  misc_feature 1..2001: note = CAR-T C2 FCHingeless Y407R/CD8/4-1BB/CD3z "FcH" CAR55
  source 1..2001: mol_type = other DNA
atggccttaccagtgaccgccttgctcctgccgctggccttgctgctccacgccgccaggccggaggtgcagctggtggagtctgggggaggcctggtcaagcctggggggtccctgagactctcctgtgcagcctctggattcaccttcagtggctatgccatgagctgggtccgccaggctccagggaaggggctggagtgggtctcaaccattagtagtggcggaacctacatatactaccccgactcagtgaagggccgattcaccatctccagagacaacgccaagaactcactgtatctgcaaatgaacagcctgagagccgaggacacggccgtgtattactgtgcgagacttgggggggataattactacgaatacttcgatgtctggggcaaagggaccacggtcaccgtctcctccggcggtggcggatccggcggtggcggatccggcggtggcggatccgacattgtgctgacccagtctccagcctccttggccgtgtctccaggacagagggccaccatcacctgcagagccagtaagagtgtcagtaccagcggatactcctacatgcactggtatcagcagaaaccaggacaacctcctaaactcctgatttacctggcatccaatctggagagcggggtcccagccaggttcagcggcagtgggtctgggaccgatttcaccctcacaattaatcctgtggaagctaatgatactgcaaattattactgtcagcacagtagggagctgcctttcacattcggcggagggaccaaggtggagatcaaacgaactgcacctgaactcctggggggaccgtcagtcttcctcttccccccaaaacccaaggacaccctcatgatctcccggacccctgaggtcacatgcgtggtggtggacgtgagccacgaagaccctgaggtcaagttcaactggtacgtggacggcgtggaggtgcataatgccaagacaaagccgcgggaggagcagtacaacagcacgtaccgtgtggtcagcgtcctcaccgtcctgcaccaggactggctgaatggcaaggagtacaagtgcaaggtctccaacaaagccctcccagcccccatcgagaaaaccatctccaaagccaaagggcagccccgagaaccacaggtgtacaccctgcccccatcccgggaggagatgaccaagaaccaggtcagcctgacctgcctggtcaaaggcttctatcccagcgacatcgccgtggagtgggagagcaatgggcagccggagaacaactacaagaccacgcctcccgtgctggactccgacggctccttcttcctcaggagcaagctcaccgtggacaagagcaggtggcagcaggggaacgtcttctcatgctccgtgatgcatgaggctctgcacaaccactacacgcagaagagcctctccctgtctccgggtaaaatctacatctgggcgcccttggccgggacttgtggggtccttctcctgtcactggttatcaccctttactgcaaacggggcagaaagaaactcctgtatatattcaaacaaccatttatgagaccagtacaaactactcaagaggaagatggctgtagctgccgatttccagaagaagaagaaggaggatgtgaactgagagtgaagttcagcaggagcgcagacgcccccgcgtacaagcagggccagaaccagctctataacgagctcaatctaggacgaagagaggagtacgatgttttggacaagagacgtggccgggaccctgagatggggggaaagccgagaaggaagaaccctcaggaaggcctgtacaatgaactgcagaaagataagatggcggaggcctacagtgagattgggatgaaaggcgagcgccggaggggcaaggggcacgatggcctttaccagggtctcagtacagccaccaaggacacctacgacgcccttcacatgcaggccctgccccctcgctgataa

SEQ ID NO: 737 - protein, 665 aa, synthetic construct
  REGION 1..665: note = CAR-T C2 FCHingeless Y407R/CD8/4-1BB/CD3z "FcH" CAR55
MALPVTALLLPLALLLHAARPEVQLVESGGGLVKPGGSLRLSCAASGFTFSGYAMSWVRQAPGKGLEWVSTISSGGTYIYYPDSVKGRFTISRDNAKNSLYLQMNSLRAEDTAVYYCARLGGDNYYEYFDVWGKGTTVTVSSGGGGSGGGGSGGGGSDIVLTQSPASLAVSPGQRATITCRASKSVSTSGYSYMHWYQQKPGQPPKLLIYLASNLESGVPARFSGSGSGTDFTLTINPVEANDTANYYCQHSRELPFTFGGGTKVEIKRTAPELLGGPSVFLFPPKPKDTLMISRTPEVTCVVVDVSHEDPEVKFNWYVDGVEVHNAKTKPREEQYNSTYRVVSVLTVLHQDWLNGKEYKCKVSNKALPAPIEKTISKAKGQPREPQVYTLPPSREEMTKNQVSLTCLVKGFYPSDIAVEWESNGQPENNYKTTPPVLDSDGSFFLRSKLTVDKSRWQQGNVFSCSVMHEALHNHYTQKSLSLSPGKIYIWAPLAGTCGVLLLSLVITLYCKRGRKKLLYIFKQPFMRPVQTTQEEDGCSCRFPEEEEGGCELRVKFSRSADAPAYKQGQNQLYNELNLGRREEYDVLDKRRGRDPEMGGKPRRKNPQEGLYNELQKDKMAEAYSEIGMKGERRRGKGHDGLYQGLSTATKDTYDALHMQALPPR

SEQ ID NO: 738 - DNA, 2175 bp, synthetic construct
  misc_feature 1..2175: note = CAR-T C2 IgD/FCHingeless Y407R/CD8/4-1BB/CD3z "IgD FcH" CAR56
  source 1..2175: mol_type = other DNA
atggccttaccagtgaccgccttgctcctgccgctggccttgctgctccacgccgccaggccggaggtgcagctggtggagtctgggggaggcctggtcaagcctggggggtccctgagactctcctgtgcagcctctggattcaccttcagtggctatgccatgagctgggtccgccaggctccagggaaggggctggagtgggtctcaaccattagtagtggcggaacctacatatactaccccgactcagtgaagggccgattcaccatctccagagacaacgccaagaactcactgtatctgcaaatgaacagcctgagagccgaggacacggccgtgtattactgtgcgagacttgggggggataattactacgaatacttcgatgtctggggcaaagggaccacggtcaccgtctcctccggcggtggcggatccggcggtggcggatccggcggtggcggatccgacattgtgctgacccagtctccagcctccttggccgtgtctccaggacagagggccaccatcacctgcagagccagtaagagtgtcagtaccagcggatactcctacatgcactggtatcagcagaaaccaggacaacctcctaaactcctgatttacctggcatccaatctggagagcggggtcccagccaggttcagcggcagtgggtctgggaccgatttcaccctcacaattaatcctgtggaagctaatgatactgcaaattattactgtcagcacagtagggagctgcctttcacattcggcggagggaccaaggtggagatcaaacgaactgagtctccaaaggcacaggcctcctcagtgcccactgcacaaccccaagcagagggcagcctcgccaaggcaaccacagccccagccaccacccgtaacacaggaagaggcggcgaagagaagaaaaaggagaaggagaaagaggaacaagaagagagagagacaaagacaccagcacctgaactcctggggggaccgtcagtcttcctcttccccccaaaacccaaggacaccctcatgatctcccggacccctgaggtcacatgcgtggtggtggacgtgagccacgaagaccctgaggtcaagttcaactggtacgtggacggcgtggaggtgcataatgccaagacaaagccgcgggaggagcagtacaacagcacgtaccgtgtggtcagcgtcctcaccgtcctgcaccaggactggctgaatggcaaggagtacaagtgcaaggtctccaacaaagccctcccagcccccatcgagaaaaccatctccaaagccaaagggcagccccgagaaccacaggtgtacaccctgcccccatcccgggaggagatgaccaagaaccaggtcagcctgacctgcctggtcaaaggcttctatcccagcgacatcgccgtggagtgggagagcaatgggcagccggagaacaactacaagaccacgcctcccgtgctggactccgacggctccttcttcctcaggagcaagctcaccgtggacaagagcaggtggcagcaggggaacgtcttctcatgctccgtgatgcatgaggctctgcacaaccactacacgcagaagagcctctccctgtctccgggtaaaatctacatctgggcgcccttggccgggacttgtggggtccttctcctgtcactggttatcaccctttactgcaaacggggcagaaagaaactcctgtatatattcaaacaaccatttatgagaccagtacaaactactcaagaggaagatggctgtagctgccgatttccagaagaagaagaaggaggatgtgaactgagagtgaagttcagcaggagcgcagacgcccccgcgtacaagcagggccagaaccagctctataacgagctcaatctaggacgaagagaggagtacgatgttttggacaagagacgtggccgggaccctgagatggggggaaagccgagaaggaagaaccctcaggaaggcctgtacaatgaactgcagaaagataagatggcggaggcctacagtgagattgggatgaaaggcgagcgccggaggggcaaggggcacgatggcctttaccagggtctcagtacagccaccaaggacacctacgacgcccttcacatgcaggccctgccccctcgctgataa

SEQ ID NO: 739 - protein, 723 aa, synthetic construct
  REGION 1..723: note = CAR-T C2 IgD/FCHingeless Y407R/CD8/4-1BB/CD3z "IgD FcH" CAR56
MALPVTALLLPLALLLHAARPEVQLVESGGGLVKPGGSLRLSCAASGFTFSGYAMSWVRQAPGKGLEWVSTISSGGTYIYYPDSVKGRFTISRDNAKNSLYLQMNSLRAEDTAVYYCARLGGDNYYEYFDVWGKGTTVTVSSGGGGSGGGGSGGGGSDIVLTQSPASLAVSPGQRATITCRASKSVSTSGYSYMHWYQQKPGQPPKLLIYLASNLESGVPARFSGSGSGTDFTLTINPVEANDTANYYCQHSRELPFTFGGGTKVEIKRTESPKAQASSVPTAQPQAEGSLAKATTAPATTRNTGRGGEEKKKEKEKEEQEERETKTPAPELLGGPSVFLFPPKPKDTLMISRTPEVTCVVVDVSHEDPEVKFNWYVDGVEVHNAKTKPREEQYNSTYRVVSVLTVLHQDWLNGKEYKCKVSNKALPAPIEKTISKAKGQPREPQVYTLPPSREEMTKNQVSLTCLVKGFYPSDIAVEWESNGQPENNYKTTPPVLDSDGSFFLRSKLTVDKSRWQQGNVFSCSVMHEALHNHYTQKSLSLSPGKIYIWAPLAGTCGVLLLSLVITLYCKRGRKKLLYIFKQPFMRPVQTTQEEDGCSCRFPEEEEGGCELRVKFSRSADAPAYKQGQNQLYNELNLGRREEYDVLDKRRGRDPEMGGKPRRKNPQEGLYNELQKDKMAEAYSEIGMKGERRRGKGHDGLYQGLSTATKDTYDALHMQALPPR

SEQ ID NO: 740 - DNA, 1524 bp, synthetic construct
  misc_feature 1..1524: note = CAR-T C2 IgD/CD8/4-1BB/CD3z "IgD" CAR57
  source 1..1524: mol_type = other DNA
atggccttaccagtgaccgccttgctcctgccgctggccttgctgctccacgccgccaggccggaggtgcagctggtggagtctgggggaggcctggtcaagcctggggggtccctgagactctcctgtgcagcctctggattcaccttcagtggctatgccatgagctgggtccgccaggctccagggaaggggctggagtgggtctcaaccattagtagtggcggaacctacatatactaccccgactcagtgaagggccgattcaccatctccagagacaacgccaagaactcactgtatctgcaaatgaacagcctgagagccgaggacacggccgtgtattactgtgcgagacttgggggggataattactacgaatacttcgatgtctggggcaaagggaccacggtcaccgtctcctccggcggtggcggatccggcggtggcggatccggcggtggcggatccgacattgtgctgacccagtctccagcctccttggccgtgtctccaggacagagggccaccatcacctgcagagccagtaagagtgtcagtaccagcggatactcctacatgcactggtatcagcagaaaccaggacaacctcctaaactcctgatttacctggcatccaatctggagagcggggtcccagccaggttcagcggcagtgggtctgggaccgatttcaccctcacaattaatcctgtggaagctaatgatactgcaaattattactgtcagcacagtagggagctgcctttcacattcggcggagggaccaaggtggagatcaaacgaactgagtctccaaaggcacaggcctcctcagtgcccactgcacaaccccaagcagagggcagcctcgccaaggcaaccacagccccagccaccacccgtaacacaggaagaggcggcgaagagaagaaaaaggagaaggagaaagaggaacaagaagagagagagacaaagacaccaatctacatctgggcgcccttggccgggacttgtggggtccttctcctgtcactggttatcaccctttactgcaaacggggcagaaagaaactcctgtatatattcaaacaaccatttatgagaccagtacaaactactcaagaggaagatggctgtagctgccgatttccagaagaagaagaaggaggatgtgaactgagagtgaagttcagcaggagcgcagacgcccccgcgtacaagcagggccagaaccagctctataacgagctcaatctaggacgaagagaggagtacgatgttttggacaagagacgtggccgggaccctgagatggggggaaagccgagaaggaagaaccctcaggaaggcctgtacaatgaactgcagaaagataagatggcggaggcctacagtgagattgggatgaaaggcgagcgccggaggggcaaggggcacgatggcctttaccagggtctcagtacagccaccaaggacacctacgacgcccttcacatgcaggccctgccccctcgctgataa

SEQ ID NO: 741 - protein, 506 aa, synthetic construct
  REGION 1..506: note = CAR-T C2 IgD/CD8/4-1BB/CD3z "IgD" CAR57
MALPVTALLLPLALLLHAARPEVQLVESGGGLVKPGGSLRLSCAASGFTFSGYAMSWVRQAPGKGLEWVSTISSGGTYIYYPDSVKGRFTISRDNAKNSLYLQMNSLRAEDTAVYYCARLGGDNYYEYFDVWGKGTTVTVSSGGGGSGGGGSGGGGSDIVLTQSPASLAVSPGQRATITCRASKSVSTSGYSYMHWYQQKPGQPPKLLIYLASNLESGVPARFSGSGSGTDFTLTINPVEANDTANYYCQHSRELPFTFGGGTKVEIKRTESPKAQASSVPTAQPQAEGSLAKATTAPATTRNTGRGGEEKKKEKEKEEQEERETKTPIYIWAPLAGTCGVLLLSLVITLYCKRGRKKLLYIFKQPFMRPVQTTQEEDGCSCRFPEEEEGGCELRVKFSRSADAPAYKQGQNQLYNELNLGRREEYDVLDKRRGRDPEMGGKPRRKNPQEGLYNELQKDKMAEAYSEIGMKGERRRGKGHDGLYQGLSTATKDTYDALHMQALPPR

SEQ ID NO: 742 - DNA, 1479 bp, synthetic construct
  misc_feature 1..1479: note = CAR-T C2 X4/CD8/4-1BB/CD3z "X4" CAR58
  source 1..1479: mol_type = other DNA
atggccttaccagtgaccgccttgctcctgccgctggccttgctgctccacgccgccaggccggaggtgcagctggtggagtctgggggaggcctggtcaagcctggggggtccctgagactctcctgtgcagcctctggattcaccttcagtggctatgccatgagctgggtccgccaggctccagggaaggggctggagtgggtctcaaccattagtagtggcggaacctacatatactaccccgactcagtgaagggccgattcaccatctccagagacaacgccaagaactcactgtatctgcaaatgaacagcctgagagccgaggacacggccgtgtattactgtgcgagacttgggggggataattactacgaatacttcgatgtctggggcaaagggaccacggtcaccgtctcctccggcggtggcggatccggcggtggcggatccggcggtggcggatccgacattgtgctgacccagtctccagcctccttggccgtgtctccaggacagagggccaccatcacctgcagagccagtaagagtgtcagtaccagcggatactcctacatgcactggtatcagcagaaaccaggacaacctcctaaactcctgatttacctggcatccaatctggagagcggggtcccagccaggttcagcggcagtgggtctgggaccgatttcaccctcacaattaatcctgtggaagctaatgatactgcaaattattactgtcagcacagtagggagctgcctttcacattcggcggagggaccaaggtggagatcaaacgaactgacaagacgcacaccaagccacctaaaccagctccagaactgctcggaggtcctggcaccggaaccggaggacctaccatcaaaccacctaagccacctaagcctgctcctaacctgctcggaggacctatctacatctgggcgcccttggccgggacttgtggggtccttctcctgtcactggttatcaccctttactgcaaacggggcagaaagaaactcctgtatatattcaaacaaccatttatgagaccagtacaaactactcaagaggaagatggctgtagctgccgatttccagaagaagaagaaggaggatgtgaactgagagtgaagttcagcaggagcgcagacgcccccgcgtacaagcagggccagaaccagctctataacgagctcaatctaggacgaagagaggagtacgatgttttggacaagagacgtggccgggaccctgagatggggggaaagccgagaaggaagaaccctcaggaaggcctgtacaatgaactgcagaaagataagatggcggaggcctacagtgagattgggatgaaaggcgagcgccggaggggcaaggggcacgatggcctttaccagggtctcagtacagccaccaaggacacctacgacgcccttcacatgcaggccctgccccctcgctgataa

SEQ ID NO: 743 - protein, 491 aa, synthetic construct
  REGION 1..491: note = CAR-T C2 X4/CD8/4-1BB/CD3z "X4" CAR58
MALPVTALLLPLALLLHAARPEVQLVESGGGLVKPGGSLRLSCAASGFTFSGYAMSWVRQAPGKGLEWVSTISSGGTYIYYPDSVKGRFTISRDNAKNSLYLQMNSLRAEDTAVYYCARLGGDNYYEYFDVWGKGTTVTVSSGGGGSGGGGSGGGGSDIVLTQSPASLAVSPGQRATITCRASKSVSTSGYSYMHWYQQKPGQPPKLLIYLASNLESGVPARFSGSGSGTDFTLTINPVEANDTANYYCQHSRELPFTFGGGTKVEIKRTDKTHTKPPKPAPELLGGPGTGTGGPTIKPPKPPKPAPNLLGGPIYIWAPLAGTCGVLLLSLVITLYCKRGRKKLLYIFKQPFMRPVQTTQEEDGCSCRFPEEEEGGCELRVKFSRSADAPAYKQGQNQLYNELNLGRREEYDVLDKRRGRDPEMGGKPRRKNPQEGLYNELQKDKMAEAYSEIGMKGERRRGKGHDGLYQGLSTATKDTYDALHMQALPPR

SEQ ID NO: 744 - DNA, 1461 bp, synthetic construct; identical to SEQ ID NO: 336
  misc_feature 1..1461: note = CAR-T E6 CD8/CD4/41BB/CD3z CAR37
  source 1..1461: mol_type = other DNA

SEQ ID NO: 745 - protein, 485 aa, synthetic construct; identical to SEQ ID NO: 337
  REGION 1..485: note = CAR-T E6 CD8/CD4/41BB/CD3z CAR37

SEQ ID NO: 746 - DNA, 1266 bp, synthetic construct
  misc_feature 1..1266: note = CAR-T E6 CD4/CD4/CD3z sequence CAR23
  source 1..1266: mol_type = other DNA
atggccctgcccgtgaccgctttgctgctccccctggcgctgctgctgcacgccgccaggccagaggtccagctggttgagagtggcggtgggctggttaagcctggcggctccctgcggctgagctgcgccgcgagtggatttactttcagccgatatgggatgagttgggtgcggcaagctcccgggaagaggctggaatgggtctcaacaatctccggggggggcacttacatctattaccccgactcagtcaaggggagatttaccatttcacgagacaacgctaagaataccctgtatttgcagatgaattctctgagagcagaggacacagctgtttactattgtacccgcgacaactatggcaggaactacgactacggtatggactattggggacaagggacattggttacagtgagcagtggcggcgggggcagcggaggaggaggcagcggtggggggggcagcgagatagtgctcacgcagtcacccgcgactctcagtctctcacctggggaacgagctaccctgacgtgctctgctacctcctcagtgtcatatattcactggtatcagcaacggcccgggcagtcccctagattgctcatttatagtacctctaatctggcctcaggtatccctgcacgattttctggatctggttcaggttctgattacaccctcactatctctagcctggagcctgaagactttgccgtttattactgccagcagaggtctagctccccattcacctttgggagtgggaccaaggttgaaattaaatcgggacaggtcctgctggaatccaacatcaaggttctgcccacatggtccaccccggtgcagccaatggccctgattgtgctggggggcgtcgccggcctcctgcttttcattgggctaggcatcttcttccgcgttaagttctcccgatcagccgacgcgcctgcttacaagcagggccagaaccaactgtacaacgagctgaatctcggtagacgggaagagtacgacgtgttggacaaacggagaggccgcgacccagaaatgggcggcaagcctcgcaggaaaaacccccaggagggactgtacaatgagttgcagaaagataagatggcagaagcttatagcgagatcggaatgaagggggaaaggagacgagggaaaggacacgacggcctttatcagggcctgtccacagcaacaaaagatacgtatgacgccctccatatgcaggcacttccaccacggtgataa

SEQ ID NO: 747 - protein, 420 aa, synthetic construct
  REGION 1..420: note = CAR-T E6 CD4/CD4/CD3z sequence CAR23
MALPVTALLLPLALLLHAARPEVQLVESGGGLVKPGGSLRLSCAASGFTFSRYGMSWVRQAPGKRLEWVSTISGGGTYIYYPDSVKGRFTISRDNAKNTLYLQMNSLRAEDTAVYYCTRDNYGRNYDYGMDYWGQGTLVTVSSGGGGSGGGGSGGGGSEIVLTQSPATLSLSPGERATLTCSATSSVSYIHWYQQRPGQSPRLLIYSTSNLASGIPARFSGSGSGSDYTLTISSLEPEDFAVYYCQQRSSSPFTFGSGTKVEIKSGQVLLESNIKVLPTWSTPVQPMALIVLGGVAGLLLFIGLGIFFRVKFSRSADAPAYKQGQNQLYNELNLGRREEYDVLDKRRGRDPEMGGKPRRKNPQEGLYNELQKDKMAEAYSEIGMKGERRRGKGHDGLYQGLSTATKDTYDALHMQALPPR

SEQ ID NO: 748 - DNA, 1389 bp, synthetic construct
  misc_feature 1..1389: note = CAR-T E6 CD4/CD4/CD28/CD3z sequence CAR25
  source 1..1389: mol_type = other DNA
atggccctgcccgtgaccgctttgctgctccccctggcgctgctgctgcacgccgccaggccagaggtccagctggttgagagtggcggtgggctggttaagcctggcggctccctgcggctgagctgcgccgcgagtggatttactttcagccgatatgggatgagttgggtgcggcaagctcccgggaagaggctggaatgggtctcaacaatctccggggggggcacttacatctattaccccgactcagtcaaggggagatttaccatttcacgagacaacgctaagaataccctgtatttgcagatgaattctctgagagcagaggacacagctgtttactattgtacccgcgacaactatggcaggaactacgactacggtatggactattggggacaagggacattggttacagtgagcagtggcggcgggggcagcggaggaggaggcagcggtggggggggcagcgagatagtgctcacgcagtcacccgcgactctcagtctctcacctggggaacgagctaccctgacgtgctctgctacctcctcagtgtcatatattcactggtatcagcaacggcccgggcagtcccctagattgctcatttatagtacctctaatctggcctcaggtatccctgcacgattttctggatctggttcaggttctgattacaccctcactatctctagcctggagcctgaagactttgccgtttattactgccagcagaggtctagctccccattcacctttgggagtgggaccaaggttgaaattaaatcgggacaggtcctgctggaatccaacatcaaggttctgcccacatggtccaccccggtgcagccaatggccctgattgtgctggggggcgtcgccggcctcctgcttttcattgggctaggcatcttcttcagaagcaagcggtctcggctcctgcattctgattacatgaacatgaccccaagaagaccaggccccaccaggaaacattaccagccctacgctccgccacgcgacttcgctgcctaccggtcccgcgttaagttctcccgatcagccgacgcgcctgcttacaagcagggccagaaccaactgtacaacgagctgaatctcggtagacgggaagagtacgacgtgttggacaaacggagaggccgcgacccagaaatgggcggcaagcctcgcaggaaaaacccccaggagggactgtacaatgagttgcagaaagataagatggcagaagcttatagcgagatcggaatgaagggggaaaggagacgagggaaaggacacgacggcctttatcagggcctgtccacagcaacaaaagatacgtatgacgccctccatatgcaggcacttccaccacggtgataa

SEQ ID NO: 749 - protein, 461 aa, synthetic construct
  REGION 1..461: note = CAR-T E6 CD4/CD4/CD28/CD3z sequence CAR25
MALPVTALLLPLALLLHAARPEVQLVESGGGLVKPGGSLRLSCAASGFTFSRYGMSWVRQAPGKRLEWVSTISGGGTYIYYPDSVKGRFTISRDNAKNTLYLQMNSLRAEDTAVYYCTRDNYGRNYDYGMDYWGQGTLVTVSSGGGGSGGGGSGGGGSEIVLTQSPATLSLSPGERATLTCSATSSVSYIHWYQQRPGQSPRLLIYSTSNLASGIPARFSGSGSGSDYTLTISSLEPEDFAVYYCQQRSSSPFTFGSGTKVEIKSGQVLLESNIKVLPTWSTPVQPMALIVLGGVAGLLLFIGLGIFFRSKRSRLLHSDYMNMTPRRPGPTRKHYQPYAPPRDFAAYRSRVKFSRSADAPAYKQGQNQLYNELNLGRREEYDVLDKRRGRDPEMGGKPRRKNPQEGLYNELQKDKMAEAYSEIGMKGERRRGKGHDGLYQGLSTATKDTYDALHMQALPPR

SEQ ID NO: 750 - DNA, 1392 bp, synthetic construct
  misc_feature 1..1392: note = CAR-T E6 CD4/CD4/4-1BB/CD3z sequence CAR31
  source 1..1392: mol_type = other DNA
atggccctgcccgtgaccgctttgctgctccccctggcgctgctgctgcacgccgccaggccagaggtccagctggttgagagtggcggtgggctggttaagcctggcggctccctgcggctgagctgcgccgcgagtggatttactttcagccgatatgggatgagttgggtgcggcaagctcccgggaagaggctggaatgggtctcaacaatctccggggggggcacttacatctattaccccgactcagtcaaggggagatttaccatttcacgagacaacgctaagaataccctgtatttgcagatgaattctctgagagcagaggacacagctgtttactattgtacccgcgacaactatggcaggaactacgactacggtatggactattggggacaagggacattggttacagtgagcagtggcggcgggggcagcggaggaggaggcagcggtggggggggcagcgagatagtgctcacgcagtcacccgcgactctcagtctctcacctggggaacgagctaccctgacgtgctctgctacctcctcagtgtcatatattcactggtatcagcaacggcccgggcagtcccctagattgctcatttatagtacctctaatctggcctcaggtatccctgcacgattttctggatctggttcaggttctgattacaccctcactatctctagcctggagcctgaagactttgccgtttattactgccagcagaggtctagctccccattcacctttgggagtgggaccaaggttgaaattaaatcgggacaggtcctgctggaatccaacatcaaggttctgcccacatggtccaccccggtgcagccaatggccctgattgtgctggggggcgtcgccggcctcctgcttttcattgggctaggcatcttcttcaaaaggggccgcaaaaaactcctttacatttttaagcagccttttatgaggccagtacagacgactcaagaggaagacgggtgctcatgccgctttcctgaggaggaggaaggagggtgcgaactgcgcgttaagttctcccgatcagccgacgcgcctgcttacaagcagggccagaaccaactgtacaacgagctgaatctcggtagacgggaagagtacgacgtgttggacaaacggagaggccgcgacccagaaatgggcggcaagcctcgcaggaaaaacccccaggagggactgtacaatgagttgcagaaagataagatggcagaagcttatagcgagatcggaatgaagggggaaaggagacgagggaaaggacacgacggcctttatcagggcctgtccacagcaacaaaagatacgtatgacgccctccatatgcaggcacttccaccacggtgataa

SEQ ID NO: 751 - protein, 462 aa, synthetic construct
  REGION 1..462: note = CAR-T E6 CD4/CD4/4-1BB/CD3z sequence CAR31
MALPVTALLLPLALLLHAARPEVQLVESGGGLVKPGGSLRLSCAASGFTFSRYGMSWVRQAPGKRLEWVSTISGGGTYIYYPDSVKGRFTISRDNAKNTLYLQMNSLRAEDTAVYYCTRDNYGRNYDYGMDYWGQGTLVTVSSGGGGSGGGGSGGGGSEIVLTQSPATLSLSPGERATLTCSATSSVSYIHWYQQRPGQSPRLLIYSTSNLASGIPARFSGSGSGSDYTLTISSLEPEDFAVYYCQQRSSSPFTFGSGTKVEIKSGQVLLESNIKVLPTWSTPVQPMALIVLGGVAGLLLFIGLGIFFKRGRKKLLYIFKQPFMRPVQTTQEEDGCSCRFPEEEEGGCELRVKFSRSADAPAYKQGQNQLYNELNLGRREEYDVLDKRRGRDPEMGGKPRRKNPQEGLYNELQKDKMAEAYSEIGMKGERRRGKGHDGLYQGLSTATKDTYDALHMQALPPR

SEQ ID NO: 752 - DNA, 1377 bp, synthetic construct
  misc_feature 1..1377: note = CAR-T E6 CD4/CD4/OX40/CD3z sequence
  source 1..1377: mol_type = other DNA
atggccctgcccgtgaccgctttgctgctccccctggcgctgctgctgcacgccgccaggccagaggtccagctggttgagagtggcggtgggctggttaagcctggcggctccctgcggctgagctgcgccgcgagtggatttactttcagccgatatgggatgagttgggtgcggcaagctcccgggaagaggctggaatgggtctcaacaatctccggggggggcacttacatctattaccccgactcagtcaaggggagatttaccatttcacgagacaacgctaagaataccctgtatttgcagatgaattctctgagagcagaggacacagctgtttactattgtacccgcgacaactatggcaggaactacgactacggtatggactattggggacaagggacattggttacagtgagcagtggcggcgggggcagcggaggaggaggcagcggtggggggggcagcgagatagtgctcacgcagtcacccgcgactctcagtctctcacctggggaacgagctaccctgacgtgctctgctacctcctcagtgtcatatattcactggtatcagcaacggcccgggcagtcccctagattgctcatttatagtacctctaatctggcctcaggtatccctgcacgattttctggatctggttcaggttctgattacaccctcactatctctagcctggagcctgaagactttgccgtttattactgccagcagaggtctagctccccattcacctttgggagtgggaccaaggttgaaattaaatcgggacaggtcctgctggaatccaacatcaaggttctgcccacatggtccaccccggtgcagccaatggccctgattgtgctggggggcgtcgccggcctcctgcttttcattgggctaggcatcttcttccggagggaccagaggctgccccccgatgcccacaagccccctgggggaggcagtttccggacccccatccaagaggagcaggccgacgcccactccaccctggccaagatccgcgttaagttctcccgatcagccgacgcgcctgcttacaagcagggccagaaccaactgtacaacgagctgaatctcggtagacgggaagagtacgacgtgttggacaaacggagaggccgcgacccagaaatgggcggcaagcctcgcaggaaaaacccccaggagggactgtacaatgagttgcagaaagataagatggcagaagcttatagcgagatcggaatgaagggggaaaggagacgagggaaaggacacgacggcctttatcagggcctgtccacagcaacaaaagatacgtatgacgccctccatatgcaggcacttccaccacggtgataa

SEQ ID NO: 753 - protein, 457 aa, synthetic construct
  REGION 1..457: note = CAR-T E6 CD4/CD4/OX40/CD3z sequence
MALPVTALLLPLALLLHAARPEVQLVESGGGLVKPGGSLRLSCAASGFTFSRYGMSWVRQAPGKRLEWVSTISGGGTYIYYPDSVKGRFTISRDNAKNTLYLQMNSLRAEDTAVYYCTRDNYGRNYDYGMDYWGQGTLVTVSSGGGGSGGGGSGGGGSEIVLTQSPATLSLSPGERATLTCSATSSVSYIHWYQQRPGQSPRLLIYSTSNLASGIPARFSGSGSGSDYTLTISSLEPEDFAVYYCQQRSSSPFTFGSGTKVEIKSGQVLLESNIKVLPTWSTPVQPMALIVLGGVAGLLLFIGLGIFFRRDQRLPPDAHKPPGGGSFRTPIQEEQADAHSTLAKIRVKFSRSADAPAYKQGQNQLYNELNLGRREEYDVLDKRRGRDPEMGGKPRRKNPQEGLYNELQKDKMAEAYSEIGMKGERRRGKGHDGLYQGLSTATKDTYDALHMQALPPR

SEQ ID NO: 754 - DNA, 1515 bp, synthetic construct
  misc_feature 1..1515: note = CAR-T E6 CD4/CD4/CD28/4-1BB/CD3z sequence CAR38
  source 1..1515: mol_type = other DNA
atggccctgcccgtgaccgctttgctgctccccctggcgctgctgctgcacgccgccaggccagaggtccagctggttgagagtggcggtgggctggttaagcctggcggctccctgcggctgagctgcgccgcgagtggatttactttcagccgatatgggatgagttgggtgcggcaagctcccgggaagaggctggaatgggtctcaacaatctccggggggggcacttacatctattaccccgactcagtcaaggggagatttaccatttcacgagacaacgctaagaataccctgtatttgcagatgaattctctgagagcagaggacacagctgtttactattgtacccgcgacaactatggcaggaactacgactacggtatggactattggggacaagggacattggttacagtgagcagtggcggcgggggcagcggaggaggaggcagcggtggggggggcagcgagatagtgctcacgcagtcacccgcgactctcagtctctcacctggggaacgagctaccctgacgtgctctgctacctcctcagtgtcatatattcactggtatcagcaacggcccgggcagtcccctagattgctcatttatagtacctctaatctggcctcaggtatccctgcacgattttctggatctggttcaggttctgattacaccctcactatctctagcctggagcctgaagactttgccgtttattactgccagcagaggtctagctccccattcacctttgggagtgggaccaaggttgaaattaaatcgggacaggtcctgctggaatccaacatcaaggttctgcccacatggtccaccccggtgcagccaatggccctgattgtgctggggggcgtcgccggcctcctgcttttcattgggctaggcatcttcttcagaagcaagcggtctcggctcctgcattctgattacatgaacatgaccccaagaagaccaggccccaccaggaaacattaccagccctacgctccgccacgcgacttcgctgcctaccggtccaaaaggggccgcaaaaaactcctttacatttttaagcagccttttatgaggccagtacagacgactcaagaggaagacgggtgctcatgccgctttcctgaggaggaggaaggagggtgcgaactgcgcgttaagttctcccgatcagccgacgcgcctgcttacaagcagggccagaaccaactgtacaacgagctgaatctcggtagacgggaagagtacgacgtgttggacaaacggagaggccgcgacccagaaatgggcggcaagcctcgcaggaaaaacccccaggagggactgtacaatgagttgcagaaagataagatggcagaagcttatagcgagatcggaatgaagggggaaaggagacgagggaaaggacacgacggcctttatcagggcctgtccacagcaacaaaagatacgtatgacgccctccatatgcaggcacttccaccacggtgataa

SEQ ID NO: 755 - protein, 503 aa, synthetic construct
  REGION 1..503: note = CAR-T E6 CD4/CD4/CD28/4-1BB/CD3z sequence CAR38
MALPVTALLLPLALLLHAARPEVQLVESGGGLVKPGGSLRLSCAASGFTFSRYGMSWVRQAPGKRLEWVSTISGGGTYIYYPDSVKGRFTISRDNAKNTLYLQMNSLRAEDTAVYYCTRDNYGRNYDYGMDYWGQGTLVTVSSGGGGSGGGGSGGGGSEIVLTQSPATLSLSPGERATLTCSATSSVSYIHWYQQRPGQSPRLLIYSTSNLASGIPARFSGSGSGSDYTLTISSLEPEDFAVYYCQQRSSSPFTFGSGTKVEIKSGQVLLESNIKVLPTWSTPVQPMALIVLGGVAGLLLFIGLGIFFRSKRSRLLHSDYMNMTPRRPGPTRKHYQPYAPPRDFAAYRSKRGRKKLLYIFKQPFMRPVQTTQEEDGCSCRFPEEEEGGCELRVKFSRSADAPAYKQGQNQLYNELNLGRREEYDVLDKRRGRDPEMGGKPRRKNPQEGLYNELQKDKMAEAYSEIGMKGERRRGKGHDGLYQGLSTATKDTYDALHMQALPPR

SEQ ID NO: 756 - DNA, 1500 bp, synthetic construct
  misc_feature 1..1500: note = CAR-T E6 CD4/CD4/CD28/OX40/CD3z sequence
  source 1..1500: mol_type = other DNA
atggccctgcccgtgaccgctttgctgctccccctggcgctgctgctgcacgccgccaggccagaggtccagctggttgagagtggcggtgggctggttaagcctggcggctccctgcggctgagctgcgccgcgagtggatttactttcagccgatatgggatgagttgggtgcggcaagctcccgggaagaggctggaatgggtctcaacaatctccggggggggcacttacatctattaccccgactcagtcaaggggagatttaccatttcacgagacaacgctaagaataccctgtatttgcagatgaattctctgagagcagaggacacagctgtttactattgtacccgcgacaactatggcaggaactacgactacggtatggactattggggacaagggacattggttacagtgagcagtggcggcgggggcagcggaggaggaggcagcggtggggggggcagcgagatagtgctcacgcagtcacccgcgactctcagtctctcacctggggaacgagctaccctgacgtgctctgctacctcctcagtgtcatatattcactggtatcagcaacggcccgggcagtcccctagattgctcatttatagtacctctaatctggcctcaggtatccctgcacgattttctggatctggttcaggttctgattacaccctcactatctctagcctggagcctgaagactttgccgtttattactgccagcagaggtctagctccccattcacctttgggagtgggaccaaggttgaaattaaatcgggacaggtcctgctggaatccaacatcaaggttctgcccacatggtccaccccggtgcagccaatggccctgattgtgctggggggcgtcgccggcctcctgcttttcattgggctaggcatcttcttcagaagcaagcggtctcggctcctgcattctgattacatgaacatgaccccaagaagaccaggccccaccaggaaacattaccagccctacgctccgccacgcgacttcgctgcctaccggtcccggagggaccagaggctgccccccgatgcccacaagccccctgggggaggcagtttccggacccccatccaagaggagcaggccgacgcccactccaccctggccaagatccgcgttaagttctcccgatcagccgacgcgcctgcttacaagcagggccagaaccaactgtacaacgagctgaatctcggtagacgggaagagtacgacgtgttggacaaacggagaggccgcgacccagaaatgggcggcaagcctcgcaggaaaaacccccaggagggactgtacaatgagttgcagaaagataagatggcagaagcttatagcgagatcggaatgaagggggaaaggagacgagggaaaggacacgacggcctttatcagggcctgtccacagcaacaaaagatacgtatgacgccctccatatgcaggcacttccaccacggtgataa

SEQ ID NO: 757 - protein, 498 aa, synthetic construct
  REGION 1..498: note = CAR-T E6 CD4/CD4/CD28/OX40/CD3z sequence
MALPVTALLLPLALLLHAARPEVQLVESGGGLVKPGGSLRLSCAASGFTFSRYGMSWVRQAPGKRLEWVSTISGGGTYIYYPDSVKGRFTISRDNAKNTLYLQMNSLRAEDTAVYYCTRDNYGRNYDYGMDYWGQGTLVTVSSGGGGSGGGGSGGGGSEIVLTQSPATLSLSPGERATLTCSATSSVSYIHWYQQRPGQSPRLLIYSTSNLASGIPARFSGSGSGSDYTLTISSLEPEDFAVYYCQQRSSSPFTFGSGTKVEIKSGQVLLESNIKVLPTWSTPVQPMALIVLGGVAGLLLFIGLGIFFRSKRSRLLHSDYMNMTPRRPGPTRKHYQPYAPPRDFAAYRSRRDQRLPPDAHKPPGGGSFRTPIQEEQADAHSTLAKIRVKFSRSADAPAYKQGQNQLYNELNLGRREEYDVLDKRRGRDPEMGGKPRRKNPQEGLYNELQKDKMAEAYSEIGMKGERRRGKGHDGLYQGLSTATKDTYDALHMQALPPR

SEQ ID NO: 758 - DNA, 1284 bp, synthetic construct
  misc_feature 1..1284: note = CAR-T C2 CD4/CD4/CD3z sequence: CAR59
  source 1..1284: mol_type = other DNA
atggccttgccagtgacggccctgctgctgccattggctcttctgttgcacgctgccaggcctgaagtgcagctcgtagagagtggcgggggactggtgaagcccggtggaagcctcagactcagttgcgccgcctcaggtttcactttttcaggttacgccatgtcctgggtaagacaggcaccggggaaaggactcgagtgggtgtctactatcagctcaggaggcacttatatatattatcctgactctgtaaaaggccgatttacgatttctcgcgacaatgcaaagaactccctctacctccaaatgaacagtcttagggcagaagacactgctgtatactattgtgcacgcctcggcggcgacaactactacgagtactttgacgtgtgggggaaagggactaccgtgacagtttcaagcggaggaggtggctcaggtggaggcgggtcaggggggggaggaagtgatattgtgctcacacaatccccagcctccctggctgtgtctcccggccaacgcgctacaattacatgtcgggcctccaaaagcgtgagcaccagcggctacagctacatgcactggtatcaacagaaaccaggacaaccccccaaactgttgatttatctcgcttcaaacttggagtccggcgtgcctgcgcgcttttcagggagtgggagcggcacagattttacgctgactatcaaccccgtagaagcaaacgatacagcgaattattattgtcaacattcccgggaactcccctttacgttcggcgggggcacaaaggtcgaaattaagagaacctcgggacaggtcctgctggaatccaacatcaaggttctgcccacatggtccaccccggtgcagccaatggccctgattgtgctggggggcgtcgccggcctcctgcttttcattgggctaggcatcttcttccgcgttaagttctcccgatcagccgacgcgcctgcttacaagcagggccagaaccaactgtacaacgagctgaatctcggtagacgggaagagtacgacgtgttggacaaacggagaggccgcgacccagaaatgggcggcaagcctcgcaggaaaaacccccaggagggactgtacaatgagttgcagaaagataagatggcagaagcttatagcgagatcggaatgaagggggaaaggagacgagggaaaggacacgacggcctttatcagggcctgtccacagcaacaaaagatacgtatgacgccctccatatgcaggcacttccaccacggtgataa

SEQ ID NO: 759 - protein, 426 aa, synthetic construct
  REGION 1..426: note = CAR-T C2 CD4/CD4/CD3z sequence: CAR59
MALPVTALLLPLALLLHAARPEVQLVESGGGLVKPGGSLRLSCAASGFTFSGYAMSWVRQAPGKGLEWVSTISSGGTYIYYPDSVKGRFTISRDNAKNSLYLQMNSLRAEDTAVYYCARLGGDNYYEYFDVWGKGTTVTVSSGGGGSGGGGSGGGGSDIVLTQSPASLAVSPGQRATITCRASKSVSTSGYSYMHWYQQKPGQPPKLLIYLASNLESGVPARFSGSGSGTDFTLTINPVEANDTANYYCQHSRELPFTFGGGTKVEIKRTSGQVLLESNIKVLPTWSTPVQPMALIVLGGVAGLLLFIGLGIFFRVKFSRSADAPAYKQGQNQLYNELNLGRREEYDVLDKRRGRDPEMGGKPRRKNPQEGLYNELQKDKMAEAYSEIGMKGERRRGKGHDGLYQGLSTATKDTYDALHMQALPPR

SEQ ID NO: 760 - DNA, 1407 bp, synthetic construct
  misc_feature 1..1407: note = CAR-T C2 CD4/CD4/CD28/CD3z sequence: CAR60
  source 1..1407: mol_type = other DNA
atggccttgccagtgacggccctgctgctgccattggctcttctgttgcacgctgccaggcctgaagtgcagctcgtagagagtggcgggggactggtgaagcccggtggaagcctcagactcagttgcgccgcctcaggtttcactttttcaggttacgccatgtcctgggtaagacaggcaccggggaaaggactcgagtgggtgtctactatcagctcaggaggcacttatatatattatcctgactctgtaaaaggccgatttacgatttctcgcgacaatgcaaagaactccctctacctccaaatgaacagtcttagggcagaagacactgctgtatactattgtgcacgcctcggcggcgacaactactacgagtactttgacgtgtgggggaaagggactaccgtgacagtttcaagcggaggaggtggctcaggtggaggcgggtcaggggggggaggaagtgatattgtgctcacacaatccccagcctccctggctgtgtctcccggccaacgcgctacaattacatgtcgggcctccaaaagcgtgagcaccagcggctacagctacatgcactggtatcaacagaaaccaggacaaccccccaaactgttgatttatctcgcttcaaacttggagtccggcgtgcctgcgcgcttttcagggagtgggagcggcacagattttacgctgactatcaaccccgtagaagcaaacgatacagcgaattattattgtcaacattcccgggaactcccctttacgttcggcgggggcacaaaggtcgaaattaagagaacctcgggacaggtcctgctggaatccaacatcaaggttctgcccacatggtccaccccggtgcagccaatggccctgattgtgctggggggcgtcgccggcctcctgcttttcattgggctaggcatcttcttcagaagcaagcggtctcggctcctgcattctgattacatgaacatgaccccaagaagaccaggccccaccaggaaacattaccagccctacgctccgccacgcgacttcgctgcctaccggtcccgcgttaagttctcccgatcagccgacgcgcctgcttacaagcagggccagaaccaactgtacaacgagctgaatctcggtagacgggaagagtacgacgtgttggacaaacggagaggccgcgacccagaaatgggcggcaagcctcgcaggaaaaacccccaggagggactgtacaatgagttgcagaaagataagatggcagaagcttatagcgagatcggaatgaagggggaaaggagacgagggaaaggacacgacggcctttatcagggcctgtccacagcaacaaaagatacgtatgacgccctccatatgcaggcacttccaccacggtgataa

SEQ ID NO: 761 - protein, 467 aa, synthetic construct
  REGION 1..467: note = CAR-T C2 CD4/CD4/CD28/CD3z sequence: CAR60
MALPVTALLLPLALLLHAARPEVQLVESGGGLVKPGGSLRLSCAASGFTFSGYAMSWVRQAPGKGLEWVSTISSGGTYIYYPDSVKGRFTISRDNAKNSLYLQMNSLRAEDTAVYYCARLGGDNYYEYFDVWGKGTTVTVSSGGGGSGGGGSGGGGSDIVLTQSPASLAVSPGQRATITCRASKSVSTSGYSYMHWYQQKPGQPPKLLIYLASNLESGVPARFSGSGSGTDFTLTINPVEANDTANYYCQHSRELPFTFGGGTKVEIKRTSGQVLLESNIKVLPTWSTPVQPMALIVLGGVAGLLLFIGLGIFFRSKRSRLLHSDYMNMTPRRPGPTRKHYQPYAPPRDFAAYRSRVKFSRSADAPAYKQGQNQLYNELNLGRREEYDVLDKRRGRDPEMGGKPRRKNPQEGLYNELQKDKMAEAYSEIGMKGERRRGKGHDGLYQGLSTATKDTYDALHMQALPPR

SEQ ID NO: 762 - DNA, 1410 bp, synthetic construct
  misc_feature 1..1410: note = CAR-T C2 CD4/CD4/4-1BB/CD3z sequence:CAR61
  source 1..1410: mol_type = other DNA
atggccttgccagtgacggccctgctgctgccattggctcttctgttgcacgctgccaggcctgaagtgcagctcgtagagagtggcgggggactggtgaagcccggtggaagcctcagactcagttgcgccgcctcaggtttcactttttcaggttacgccatgtcctgggtaagacaggcaccggggaaaggactcgagtgggtgtctactatcagctcaggaggcacttatatatattatcctgactctgtaaaaggccgatttacgatttctcgcgacaatgcaaagaactccctctacctccaaatgaacagtcttagggcagaagacactgctgtatactattgtgcacgcctcggcggcgacaactactacgagtactttgacgtgtgggggaaagggactaccgtgacagtttcaagcggaggaggtggctcaggtggaggcgggtcaggggggggaggaagtgatattgtgctcacacaatccccagcctccctggctgtgtctcccggccaacgcgctacaattacatgtcgggcctccaaaagcgtgagcaccagcggctacagctacatgcactggtatcaacagaaaccaggacaaccccccaaactgttgatttatctcgcttcaaacttggagtccggcgtgcctgcgcgcttttcagggagtgggagcggcacagattttacgctgactatcaaccccgtagaagcaaacgatacagcgaattattattgtcaacattcccgggaactcccctttacgttcggcgggggcacaaaggtcgaaattaagagaacctcgggacaggtcctgctggaatccaacatcaaggttctgcccacatggtccaccccggtgcagccaatggccctgattgtgctggggggcgtcgccggcctcctgcttttcattgggctaggcatcttcttcaaaaggggccgcaaaaaactcctttacatttttaagcagccttttatgaggccagtacagacgactcaagaggaagacgggtgctcatgccgctttcctgaggaggaggaaggagggtgcgaactgcgcgttaagttctcccgatcagccgacgcgcctgcttacaagcagggccagaaccaactgtacaacgagctgaatctcggtagacgggaagagtacgacgtgttggacaaacggagaggccgcgacccagaaatgggcggcaagcctcgcaggaaaaacccccaggagggactgtacaatgagttgcagaaagataagatggcagaagcttatagcgagatcggaatgaagggggaaaggagacgagggaaaggacacgacggcctttatcagggcctgtccacagcaacaaaagatacgtatgacgccctccatatgcaggcacttccaccacggtgataa

SEQ ID NO: 763 - protein, 468 aa, synthetic construct; identical to SEQ ID NO: 731
  REGION 1..468: note = CAR-T C2 CD4/CD4/4-1BB/CD3z sequence:CAR61

SEQ ID NO: 764 - DNA, 1395 bp, synthetic construct
  misc_feature 1..1395: note = CAR-T C2 CD4/CD4/OX40/CD3z sequence:
  source 1..1395: mol_type = other DNA
atggccttgccagtgacggccctgctgctgccattggctcttctgttgcacgctgccaggcctgaagtgcagctcgtagagagtggcgggggactggtgaagcccggtggaagcctcagactcagttgcgccgcctcaggtttcactttttcaggttacgccatgtcctgggtaagacaggcaccggggaaaggactcgagtgggtgtctactatcagctcaggaggcacttatatatattatcctgactctgtaaaaggccgatttacgatttctcgcgacaatgcaaagaactccctctacctccaaatgaacagtcttagggcagaagacactgctgtatactattgtgcacgcctcggcggcgacaactactacgagtactttgacgtgtgggggaaagggactaccgtgacagtttcaagcggaggaggtggctcaggtggaggcgggtcaggggggggaggaagtgatattgtgctcacacaatccccagcctccctggctgtgtctcccggccaacgcgctacaattacatgtcgggcctccaaaagcgtgagcaccagcggctacagctacatgcactggtatcaacagaaaccaggacaaccccccaaactgttgatttatctcgcttcaaacttggagtccggcgtgcctgcgcgcttttcagggagtgggagcggcacagattttacgctgactatcaaccccgtagaagcaaacgatacagcgaattattattgtcaacattcccgggaactcccctttacgttcggcgggggcacaaaggtcgaaattaagagaacctcgggacaggtcctgctggaatccaacatcaaggttctgcccacatggtccaccccggtgcagccaatggccctgattgtgctggggggcgtcgccggcctcctgcttttcattgggctaggcatcttcttccggagggaccagaggctgccccccgatgcccacaagccccctgggggaggcagtttccggacccccatccaagaggagcaggccgacgcccactccaccctggccaagatccgcgttaagttctcccgatcagccgacgcgcctgcttacaagcagggccagaaccaactgtacaacgagctgaatctcggtagacgggaagagtacgacgtgttggacaaacggagaggccgcgacccagaaatgggcggcaagcctcgcaggaaaaacccccaggagggactgtacaatgagttgcagaaagataagatggcagaagcttatagcgagatcggaatgaagggggaaaggagacgagggaaaggacacgacggcctttatcagggcctgtccacagcaacaaaagatacgtatgacgccctccatatgcaggcacttccaccacggtgataa

SEQ ID NO: 765 - protein, 463 aa, synthetic construct
  REGION 1..463: note = CAR-T C2 CD4/CD4/OX40/CD3z sequence
MALPVTALLLPLALLLHAARPEVQLVESGGGLVKPGGSLRLSCAASGFTFSGYAMSWVRQAPGKGLEWVSTISSGGTYIYYPDSVKGRFTISRDNAKNSLYLQMNSLRAEDTAVYYCARLGGDNYYEYFDVWGKGTTVTVSSGGGGSGGGGSGGGGSDIVLTQSPASLAVSPGQRATITCRASKSVSTSGYSYMHWYQQKPGQPPKLLIYLASNLESGVPARFSGSGSGTDFTLTINPVEANDTANYYCQHSRELPFTFGGGTKVEIKRTSGQVLLESNIKVLPTWSTPVQPMALIVLGGVAGLLLFIGLGIFFRRDQRLPPDAHKPPGGGSFRTPIQEEQADAHSTLAKIRVKFSRSADAPAYKQGQNQLYNELNLGRREEYDVLDKRRGRDPEMGGKPRRKNPQEGLYNELQKDKMAEAYSEIGMKGERRRGKGHDGLYQGLSTATKDTYDALHMQALPPR

SEQ ID NO: 766 - DNA, 1533 bp, synthetic construct
  misc_feature 1..1533: note = CAR-T C2 CD4/CD4/CD28/4-1BB/CD3z sequence: CAR62
  source 1..1533: mol_type = other DNA
atggccttgccagtgacggccctgctgctgccattggctcttctgttgcacgctgccaggcctgaagtgcagctcgtagagagtggcgggggactggtgaagcccggtggaagcctcagactcagttgcgccgcctcaggtttcactttttcaggttacgccatgtcctgggtaagacaggcaccggggaaaggactcgagtgggtgtctactatcagctcaggaggcacttatatatattatcctgactctgtaaaaggccgatttacgatttctcgcgacaatgcaaagaactccctctacctccaaatgaacagtcttagggcagaagacactgctgtatactattgtgcacgcctcggcggcgacaactactacgagtactttgacgtgtgggggaaagggactaccgtgacagtttcaagcggaggaggtggctcaggtggaggcgggtcaggggggggaggaagtgatattgtgctcacacaatccccagcctccctggctgtgtctcccggccaacgcgctacaattacatgtcgggcctccaaaagcgtgagcaccagcggctacagctacatgcactggtatcaacagaaaccaggacaaccccccaaactgttgatttatctcgcttcaaacttggagtccggcgtgcctgcgcgcttttcagggagtgggagcggcacagattttacgctgactatcaaccccgtagaagcaaacgatacagcgaattattattgtcaacattcccgggaactcccctttacgttcggcgggggcacaaaggtcgaaattaagagaacctcgggacaggtcctgctggaatccaacatcaaggttctgcccacatggtccaccccggtgcagccaatggccctgattgtgctggggggcgtcgccggcctcctgcttttcattgggctaggcatcttcttcagaagcaagcggtctcggctcctgcattctgattacatgaacatgaccccaagaagaccaggccccaccaggaaacattaccagccctacgctccgccacgcgacttcgctgcctaccggtccaaaaggggccgcaaaaaactcctttacatttttaagcagccttttatgaggccagtacagacgactcaagaggaagacgggtgctcatgccgctttcctgaggaggaggaaggagggtgcgaactgcgcgttaagttctcccgatcagccgacgcgcctgcttacaagcagggccagaaccaactgtacaacgagctgaatctcggtagacgggaagagtacgacgtgttggacaaacggagaggccgcgacccagaaatgggcggcaagcctcgcaggaaaaacccccaggagggactgtacaatgagttgcagaaagataagatggcagaagcttatagcgagatcggaatgaagggggaaaggagacgagggaaaggacacgacggcctttatcagggcctgtccacagcaacaaaagatacgtatgacgccctccatatgcaggcacttccaccacggtgataa

SEQ ID NO: 767 - protein, 509 aa, synthetic construct
  REGION 1..509: note = CAR-T C2 CD4/CD4/CD28/4-1BB/CD3z sequence: CAR62
MALPVTALLLPLALLLHAARPEVQLVESGGGLVKPGGSLRLSCAASGFTFSGYAMSWVRQAPGKGLEWVSTISSGGTYIYYPDSVKGRFTISRDNAKNSLYLQMNSLRAEDTAVYYCARLGGDNYYEYFDVWGKGTTVTVSSGGGGSGGGGSGGGGSDIVLTQSPASLAVSPGQRATITCRASKSVSTSGYSYMHWYQQKPGQPPKLLIYLASNLESGVPARFSGSGSGTDFTLTINPVEANDTANYYCQHSRELPFTFGGGTKVEIKRTSGQVLLESNIKVLPTWSTPVQPMALIVLGGVAGLLLFIGLGIFFRSKRSRLLHSDYMNMTPRRPGPTRKHYQPYAPPRDFAAYRSKRGRKKLLYIFKQPFMRPVQTTQEEDGCSCRFPEEEEGGCELRVKFSRSADAPAYKQGQNQLYNELNLGRREEYDVLDKRRGRDPEMGGKPRRKNPQEGLYNELQKDKMAEAYSEIGMKGERRRGKGHDGLYQGLSTATKDTYDALHMQALPPR

SEQ ID NO: 768 - DNA, 1518 bp, synthetic construct
  misc_feature 1..1518: note = CAR-T C2 CD4/CD4/CD28/OX40/CD3z sequence
  source 1..1518: mol_type = other DNA
atggccttgccagtgacggccctgctgctgccattggctcttctgttgcacgctgccaggcctgaagtgcagctcgtagagagtggcgggggactggtgaagcccggtggaagcctcagactcagttgcgccgcctcaggtttcactttttcaggttacgccatgtcctgggtaagacaggcaccggggaaaggactcgagtgggtgtctactatcagctcaggaggcacttatatatattatcctgactctgtaaaaggccgatttacgatttctcgcgacaatgcaaagaactccctctacctccaaatgaacagtcttagggcagaagacactgctgtatactattgtgcacgcctcggcggcgacaactactacgagtactttgacgtgtgggggaaagggactaccgtgacagtttcaagcggaggaggtggctcaggtggaggcgggtcaggggggggaggaagtgatattgtgctcacacaatccccagcctccctggctgtgtctcccggccaacgcgctacaattacatgtcgggcctccaaaagcgtgagcaccagcggctacagctacatgcactggtatcaacagaaaccaggacaaccccccaaactgttgatttatctcgcttcaaacttggagtccggcgtgcctgcgcgcttttcagggagtgggagcggcacagattttacgctgactatcaaccccgtagaagcaaacgatacagcgaattattattgtcaacattcccgggaactcccctttacgttcggcgggggcacaaaggtcgaaattaagagaacctcgggacaggtcctgctggaatccaacatcaaggttctgcccacatggtccaccccggtgcagccaatggccctgattgtgctggggggcgtcgccggcctcctgcttttcattgggctaggcatcttcttcagaagcaagcggtctcggctcctgcattctgattacatgaacatgaccccaagaagaccaggccccaccaggaaacattaccagccctacgctccgccacgcgacttcgctgcctaccggtcccggagggaccagaggctgccccccgatgcccacaagccccctgggggaggcagtttccggacccccatccaagaggagcaggccgacgcccactccaccctggccaagatccgcgttaagttctcccgatcagccgacgcgcctgcttacaagcagggccagaaccaactgtacaacgagctgaatctcggtagacgggaagagtacgacgtgttggacaaacggagaggccgcgacccagaaatgggcggcaagcctcgcaggaaaaacccccaggagggactgtacaatgagttgcagaaagataagatggcagaagcttatagcgagatcggaatgaagggggaaaggagacgagggaaaggacacgacggcctttatcagggcctgtccacagcaacaaaagatacgtatgacgccctccatatgcaggcacttccaccacggtgataa

SEQ ID NO: 769 - protein, 504 aa, synthetic construct
  REGION 1..504: note = CAR-T C2 CD4/CD4/CD28/OX40/CD3z sequence
MALPVTALLLPLALLLHAARPEVQLVESGGGLVKPGGSLRLSCAASGFTFSGYAMSWVRQAPGKGLEWVSTISSGGTYIYYPDSVKGRFTISRDNAKNSLYLQMNSLRAEDTAVYYCARLGGDNYYEYFDVWGKGTTVTVSSGGGGSGGGGSGGGGSDIVLTQSPASLAVSPGQRATITCRASKSVSTSGYSYMHWYQQKPGQPPKLLIYLASNLESGVPARFSGSGSGTDFTLTINPVEANDTANYYCQHSRELPFTFGGGTKVEIKRTSGQVLLESNIKVLPTWSTPVQPMALIVLGGVAGLLLFIGLGIFFRSKRSRLLHSDYMNMTPRRPGPTRKHYQPYAPPRDFAAYRSRRDQRLPPDAHKPPGGGSFRTPIQEEQADAHSTLAKIRVKFSRSADAPAYKQGQNQLYNELNLGRREEYDVLDKRRGRDPEMGGKPRRKNPQEGLYNELQKDKMAEAYSEIGMKGERRRGKGHDGLYQGLSTATKDTYDALHMQALPPR

SEQ ID NO: 770 - DNA, 2202 bp, synthetic construct
  misc_feature 1..2202: note = CAR-T E6 IgD/FC/CD8/4-1BB/CD3z CAR63
  source 1..2202: mol_type = other DNA
atggccctgcccgtgaccgctttgctgctccccctggcgctgctgctgcacgccgccaggccagaggtccagctggttgagagtggcggtgggctggttaagcctggcggctccctgcggctgagctgcgccgcgagtggatttactttcagccgatatgggatgagttgggtgcggcaagctcccgggaagaggctggaatgggtctcaacaatctccggggggggcacttacatctattaccccgactcagtcaaggggagatttaccatttcacgagacaacgctaagaataccctgtatttgcagatgaattctctgagagcagaggacacagctgtttactattgtacccgcgacaactatggcaggaactacgactacggtatggactattggggacaagggacattggttacagtgagcagtggcggcgggggcagcggaggaggaggcagcggtggcggaggcagcgagatagtgctcacgcagtcacccgcgactctcagtctctcacctggggaacgagctaccctgacgtgctctgctacctcctcagtgtcatatattcactggtatcagcaacggcccgggcagtcccctagattgctcatttatagtacctctaatctggcctcaggtatccctgcacgattttctggatctggttcaggttctgattacaccctcactatctctagcctggagcctgaagactttgccgtttattactgccagcagaggtctagctccccattcacctttgggagtgggaccaaggttgaaattaaagagtctccaaaggcacaggcctcctcagtgcccactgcacaaccccaagcagagggcagcctcgccaaggcaaccacagccccagccaccacccgtaacacaggaagaggcggcgaagagaagaaaaaggagaaggagaaagaggaacaagaagagagagagacaaagacaccagagcccaaatcttgtgacaaaactcacacatgcccaccgtgcccagcacctgaactcctggggggaccgtcagtcttcctcttccccccaaaacccaaggacaccctcatgatctcccggacccctgaggtcacatgcgtggtggtggacgtgagccacgaagaccctgaggtcaagttcaactggtacgtggacggcgtggaggtgcataatgccaagacaaagccgcgggaggagcagtacaacagcacgtaccgtgtggtcagcgtcctcaccgtcctgcaccaggactggctgaatggcaaggagtacaagtgcaaggtctccaacaaagccctcccagcccccatcgagaaaaccatctccaaagccaaagggcagccccgagaaccacaggtgtacaccctgcccccatcccgggaggagatgaccaagaaccaggtcagcctgacctgcctggtcaaaggcttctatcccagcgacatcgccgtggagtgggagagcaatgggcagccggagaacaactacaagaccacgcctcccgtgctggactccgacggctccttcttcctctacagcaagctcaccgtggacaagagcaggtggcagcaggggaacgtcttctcatgctccgtgatgcatgaggctctgcacaaccactacacgcagaagagcctctccctgtctccgggtaaaatctacatctgggcgcccttggccgggacttgtggggtccttctcctgtcactggttatcaccctttactgcaaacggggcagaaagaaactcctgtatatattcaaacaaccatttatgagaccagtacaaactactcaagaggaagatggctgtagctgccgatttccagaagaagaagaaggaggatgtgaactgagagtgaagttcagcaggagcgcagacgcccccgcgtacaagcagggccagaaccagctctataacgagctcaatctaggacgaagagaggagtacgatgttttggacaagagacgtggccgggaccctgagatggggggaaagccgagaaggaagaaccctcaggaaggcctgtacaatgaactgcagaaagataagatggcggaggcctacagtgagattgggatgaaaggcgagcgccggaggggcaaggggcacgatggcctttaccagggtctcagtacagccaccaaggacacctacgacgcccttcacatgcaggccctgccccctcgctgataa

SEQ ID NO: 771 - protein, 732 aa, synthetic construct
  REGION 1..732: note = CAR-T E6 IgD/FC/CD8/4-1BB/CD3z CAR63
MALPVTALLLPLALLLHAARPEVQLVESGGGLVKPGGSLRLSCAASGFTFSRYGMSWVRQAPGKRLEWVSTISGGGTYIYYPDSVKGRFTISRDNAKNTLYLQMNSLRAEDTAVYYCTRDNYGRNYDYGMDYWGQGTLVTVSSGGGGSGGGGSGGGGSEIVLTQSPATLSLSPGERATLTCSATSSVSYIHWYQQRPGQSPRLLIYSTSNLASGIPARFSGSGSGSDYTLTISSLEPEDFAVYYCQQRSSSPFTFGSGTKVEIKESPKAQASSVPTAQPQAEGSLAKATTAPATTRNTGRGGEEKKKEKEKEEQEERETKTPEPKSCDKTHTCPPCPAPELLGGPSVFLFPPKPKDTLMISRTPEVTCVVVDVSHEDPEVKFNWYVDGVEVHNAKTKPREEQYNSTYRVVSVLTVLHQDWLNGKEYKCKVSNKALPAPIEKTISKAKGQPREPQVYTLPPSREEMTKNQVSLTCLVKGFYPSDIAVEWESNGQPENNYKTTPPVLDSDGSFFLYSKLTVDKSRWQQGNVFSCSVMHEALHNHYTQKSLSLSPGKIYIWAPLAGTCGVLLLSLVITLYCKRGRKKLLYIFKQPFMRPVQTTQEEDGCSCRFPEEEEGGCELRVKFSRSADAPAYKQGQNQLYNELNLGRREEYDVLDKRRGRDPEMGGKPRRKNPQEGLYNELQKDKMAEAYSEIGMKGERRRGKGHDGLYQGLSTATKDTYDALHMQALPPR

SEQ ID NO: 772 - DNA, 2157 bp, synthetic construct
  misc_feature 1..2157: note = CAR-T E6 IgD/FCHingeless Y407R/CD8/4-1BB/CD3z CAR64
  source 1..2157: mol_type = other DNA
atggccctgcccgtgaccgctttgctgctccccctggcgctgctgctgcacgccgccaggccagaggtccagctggttgagagtggcggtgggctggttaagcctggcggctccctgcggctgagctgcgccgcgagtggatttactttcagccgatatgggatgagttgggtgcggcaagctcccgggaagaggctggaatgggtctcaacaatctccggggggggcacttacatctattaccccgactcagtcaaggggagatttaccatttcacgagacaacgctaagaataccctgtatttgcagatgaattctctgagagcagaggacacagctgtttactattgtacccgcgacaactatggcaggaactacgactacggtatggactattggggacaagggacattggttacagtgagcagtggcggcgggggcagcggaggaggaggcagcggtggcggaggcagcgagatagtgctcacgcagtcacccgcgactctcagtctctcacctggggaacgagctaccctgacgtgctctgctacctcctcagtgtcatatattcactggtatcagcaacggcccgggcagtcccctagattgctcatttatagtacctctaatctggcctcaggtatccctgcacgattttctggatctggttcaggttctgattacaccctcactatctctagcctggagcctgaagactttgccgtttattactgccagcagaggtctagctccccattcacctttgggagtgggaccaaggttgaaattaaagagtctccaaaggcacaggcctcctcagtgcccactgcacaaccccaagcagagggcagcctcgccaaggcaaccacagccccagccaccacccgtaacacaggaagaggcggcgaagagaagaaaaaggagaaggagaaagaggaacaagaagagagagagacaaagacaccagcacctgaactcctggggggaccgtcagtcttcctcttccccccaaaacccaaggacaccctcatgatctcccggacccctgaggtcacatgcgtggtggtggacgtgagccacgaagaccctgaggtcaagttcaactggtacgtggacggcgtggaggtgcataatgccaagacaaagccgcgggaggagcagtacaacagcacgtaccgtgtggtcagcgtcctcaccgtcctgcaccaggactggctgaatggcaaggagtacaagtgcaaggtctccaacaaagccctcccagcccccatcgagaaaaccatctccaaagccaaagggcagccccgagaaccacaggtgtacaccctgcccccatcccgggaggagatgaccaagaaccaggtcagcctgacctgcctggtcaaaggcttctatcccagcgacatcgccgtggagtgggagagcaatgggcagccggagaacaactacaagaccacgcctcccgtgctggactccgacggctccttcttcctcaggagcaagctcaccgtggacaagagcaggtggcagcaggggaacgtcttctcatgctccgtgatgcatgaggctctgcacaaccactacacgcagaagagcctctccctgtctccgggtaaaatctacatctgggcgcccttggccgggacttgtggggtccttctcctgtcactggttatcaccctttactgcaaacggggcagaaagaaactcctgtatatattcaaacaaccatttatgagaccagtacaaactactcaagaggaagatggctgtagctgccgatttccagaagaagaagaaggaggatgtgaactgagagtgaagttcagcaggagcgcagacgcccccgcgtacaagcagggccagaaccagctctataacgagctcaatctaggacgaagagaggagtacgatgttttggacaagagacgtggccgggaccctgagatggggggaaagccgagaaggaagaaccctcaggaaggcctgtacaatgaactgcagaaagataagatggcggaggcctacagtgagattgggatgaaaggcgagcgccggaggggcaaggggcacgatggcctttaccagggtctcagtacagccaccaaggacacctacgacgcccttcacatgcaggccctgccccctcgctgataa

SEQ ID NO: 773 - protein, 717 aa, synthetic construct
  REGION 1..717: note = CAR-T E6 IgD/FCHingeless Y407R/CD8/4-1BB/CD3z CAR64
MALPVTALLLPLALLLHAARPEVQLVESGGGLVKPGGSLRLSCAASGFTFSRYGMSWVRQAPGKRLEWVSTISGGGTYIYYPDSVKGRFTISRDNAKNTLYLQMNSLRAEDTAVYYCTRDNYGRNYDYGMDYWGQGTLVTVSSGGGGSGGGGSGGGGSEIVLTQSPATLSLSPGERATLTCSATSSVSYIHWYQQRPGQSPRLLIYSTSNLASGIPARFSGSGSGSDYTLTISSLEPEDFAVYYCQQRSSSPFTFGSGTKVEIKESPKAQASSVPTAQPQAEGSLAKATTAPATTRNTGRGGEEKKKEKEKEEQEERETKTPAPELLGGPSVFLFPPKPKDTLMISRTPEVTCVVVDVSHEDPEVKFNWYVDGVEVHNAKTKPREEQYNSTYRVVSVLTVLHQDWLNGKEYKCKVSNKALPAPIEKTISKAKGQPREPQVYTLPPSREEMTKNQVSLTCLVKGFYPSDIAVEWESNGQPENNYKTTPPVLDSDGSFFLRSKLTVDKSRWQQGNVFSCSVMHEALHNHYTQKSLSLSPGKIYIWAPLAGTCGVLLLSLVITLYCKRGRKKLLYIFKQPFMRPVQTTQEEDGCSCRFPEEEEGGCELRVKFSRSADAPAYKQGQNQLYNELNLGRREEYDVLDKRRGRDPEMGGKPRRKNPQEGLYNELQKDKMAEAYSEIGMKGERRRGKGHDGLYQGLSTATKDTYDALHMQALPPR

SEQ ID NO: 774 - DNA, 3829 bp, synthetic construct
  misc_feature 1..3829: note = NFATc1P2-MMP9
  source 1..3829: mol_type = other DNA
caggcctggggacactcgcggcgggaagatttggaggggaggggagggggaggggcgtgggggcgcggcctcgctggagtccccctgaccccccgacccccgcccaccggcctgggcgtcctcccgcggcccctcctcccctcccggcgcccggtgctctggggcgcgtgccacgcctggctcggcgccgtaggggcccccgcaggtagagacccctggaaatggcctcgacgccgcaggagcgaggcggccaccaccccgctaatccgggcacgtctctccaggccgaggcctgcggtggaaaagccggggttccatttgtgctgagtcggggcggccgaatggagccaggcctcgggacgcgggacggacgggctctggccgcgcaccttcgcgggctctgcagcgcccgaccgcctcccccggcagggaggaggcgcttgtggggggcacccacggggcacagtgatccctgggggtctgcggacctcctgggccccgcagcagacacgagtttagcctttgggtttagtttaaatcacataagggtgtcgtgcaatcgatttatggtttctacacaccagacactttaacctccaaccccccccatccaaagccaacaagaaaatgcggtgccgtgttggcagctgagctgcgcccgaagagacgcagggagacgtaagagaggaaagtgtgagtggccggggggcctccccccgtcagaagtcgcgcagtcgcgcccataaaacgccccctccgggcggctagggcaggtgagcgcgtccccgggcctccccacgccggcccctgccacaggccgtctaggtcgagcagatatttacagaataaaaatgacaataactcgacgtcccgggacggccacgcaatctgttagtaatttagcgggatgggaatttcctttctagggcctgccagtgaagcgcttttccaaatttccacagcgggggaagcctgcgattttacataatgacttcagcatgccgggctttctcgacacccctccccggcccccggcccccgccccccgccccttttccagcagggccgggctccctccggacacccgcgtggactcaggcgtcccgtctggcccgttcgcccccgtttcccccgccagccccagcgcccccctgcccggcccccggattccccgttcccgcccctacgcccccatcccctccccgtgcgcccctccccgtgcgcccccctccccgtgcgccccccctccccgtgcgcccccctccccgtgcgccccccctccccgggcgcccccctccccgggcgccccccctccccgtgcgcccccccctccccgtgcgccccccctccccgtgcgcgccccgcctcttgcgcccctgcccccaggcgagcggctgccgcggcgcggggaggggcgggcgctcggcgactcgtccccggggccccgcgcgggcccgggcagcaggggcgtgatgtcacggcagggagggggcgcgggagccgccgggccggcggggaggcgggggaggtgttttccagctttaaaaaggcaggaggcagagcgcggccctgcgtcagagcgagactcagaggctccgaactcgccggcggagtcgccgcgccagatcccagcagcagggcgcggaagcttctctcgacattcgtttctagagccaccatgagcctctggcagcccctggtcctggtgctcctggtgctgggctgctgctttgctgcccccagacagcgccagtccacccttgtgctcttccctggagacctgagaaccaatctcaccgacaggcagctggcagaggaatacctgtaccgctatggttacactcgggtggcagagatgcgtggagagtcgaaatctctggggcctgcgctgctgcttctccagaagcaactgtccctgcccgagaccggtgagctggatagcgccacgctgaaggccatgcgaaccccacggtgcggggtcccagacctgggcagattccaaacctttgagggcgacctcaagtggcaccaccacaacatcacctattggatccaaaactactcggaagacttgccgcgggcggtgattgacgacgcctttgcccgcgccttcgcactgtggagcgcggtgacgccgctcaccttcactcgcgtgtacagccgggacgcagacatcgtcatccagtttggtgtcgcggagcacggagacgggtatcccttcgacgggaaggacgggctcctggcacacgcctttcctcctggccccggcattcagggagacgcccatttcgacgatgacgagttgtggtccctgggcaagggcgtcgtggttccaactcggtttggaaacgcagatggcgcggcctgccacttccccttcatcttcgagggccgctcctactctgcctgcaccaccgacggtcgctccgacggcttgccctggtgcagtaccacggccaactacgacaccgacgaccggtttggcttctgccccagcgagagactctacacccaggacggcaatgctgatgggaaaccctgccagtttccattcatcttccaaggccaatcctactccgcctgcaccacggacggtcgctccgacggctaccgctggtgcgccaccaccgccaactacgaccgggacaagctcttcggcttctgcccgacccgagctgactcgacggtgatggggggcaactcggcgggggagctgtgcgtcttccccttcactttcctgggtaaggagtactcgacctgtaccagcgagggccgcggagatgggcgcctctggtgcgctaccacctcgaactttgacagcgacaagaagtggggcttctgcccggaccaaggatacagtttgttcctcgtggcggcgcatgagttcggccacgcgctgggcttagatcattcctcagtgccggaggcgctcatgtaccctatgtaccgcttcactgaggggccccccttgcataaggacgacgtgaatggcatccggcacctctatggtcctcgccctgaacctgagccacggcctccaaccaccaccacaccgcagcccacggctcccccgacggtctgccccaccggaccccccactgtccacccctcagagcgccccacagctggccccacaggtcccccctcagctggccccacaggtccccccactgctggcccttctacggccactactgtgcctttgagtccggtggacgatgcctgcaacgtgaacatcttcgacgccatcgcggagattgggaaccagctgtatttgttcaaggatgggaagtactggcgattctctgagggcagggggagccggccgcagggccccttccttatcgccgacaagtggcccgcgctgccccgcaagctggactcggtctttgaggagcggctctccaagaagcttttcttcttctctgggcgccaggtgtgggtgtacacaggcgcgtcggtgctgggcccgaggcgtctggacaagctgggcctgggagccgacgtggcccaggtgaccggggccctccggagtggcagggggaagatgctgctgttcagcgggcggcgcctctggaggttcgacgtgaaggcgcagatggtggatccccggagcgccagcgaggtggaccggatgttccccggggtgcctttggacacgcacgacgtcttccagtaccgagagaaagcctatttctgccaggaccgcttctactggcgcgtgagttcccggagtgagttgaaccaggtggaccaagtgggctacgtgacctatgacatcctgcagtgccctgaggacgattacaaggatgacgacgataagtgataa

SEQ ID NO: 775 - DNA, 2794 bp, synthetic construct
  misc_feature 1..2794: note = NFATc1P2-MMP9cat
  source 1..2794: mol_type = other DNA
caggcctggggacactcgcggcgggaagatttggaggggaggggagggggaggggcgtgggggcgcggcctcgctggagtccccctgaccccccgacccccgcccaccggcctgggcgtcctcccgcggcccctcctcccctcccggcgcccggtgctctggggcgcgtgccacgcctggctcggcgccgtaggggcccccgcaggtagagacccctggaaatggcctcgacgccgcaggagcgaggcggccaccaccccgctaatccgggcacgtctctccaggccgaggcctgcggtggaaaagccggggttccatttgtgctgagtcggggcggccgaatggagccaggcctcgggacgcgggacggacgggctctggccgcgcaccttcgcgggctctgcagcgcccgaccgcctcccccggcagggaggaggcgcttgtggggggcacccacggggcacagtgatccctgggggtctgcggacctcctgggccccgcagcagacacgagtttagcctttgggtttagtttaaatcacataagggtgtcgtgcaatcgatttatggtttctacacaccagacactttaacctccaaccccccccatccaaagccaacaagaaaatgcggtgccgtgttggcagctgagctgcgcccgaagagacgcagggagacgtaagagaggaaagtgtgagtggccggggggcctccccccgtcagaagtcgcgcagtcgcgcccataaaacgccccctccgggcggctagggcaggtgagcgcgtccccgggcctccccacgccggcccctgccacaggccgtctaggtcgagcagatatttacagaataaaaatgacaataactcgacgtcccgggacggccacgcaatctgttagtaatttagcgggatgggaatttcctttctagggcctgccagtgaagcgcttttccaaatttccacagcgggggaagcctgcgattttacataatgacttcagcatgccgggctttctcgacacccctccccggcccccggcccccgccccccgccccttttccagcagggccgggctccctccggacacccgcgtggactcaggcgtcccgtctggcccgttcgcccccgtttcccccgccagccccagcgcccccctgcccggcccccggattccccgttcccgcccctacgcccccatcccctccccgtgcgcccctccccgtgcgcccccctccccgtgcgccccccctccccgtgcgcccccctccccgtgcgccccccctccccgggcgcccccctccccgggcgccccccctccccgtgcgcccccccctccccgtgcgccccccctccccgtgcgcgccccgcctcttgcgcccctgcccccaggcgagcggctgccgcggcgcggggaggggcgggcgctcggcgactcgtccccggggccccgcgcgggcccgggcagcaggggcgtgatgtcacggcagggagggggcgcgggagccgccgggccggcggggaggcgggggaggtgttttccagctttaaaaaggcaggaggcagagcgcggccctgcgtcagagcgagactcagaggctccgaactcgccggcggagtcgccgcgccagatcccagcagcagggcgcggaagcttctctcgacattcgtttctagagccaccatgagcctctggcagcccctggtcctggtgctcctggtgctgggctgctgctttgctttccaaacctttgagggcgacctcaagtggcaccaccacaacatcacctattggatccaaaactactcggaagacttgccgcgggcggtgattgacgacgcctttgcccgcgccttcgcactgtggagcgcggtgacgccgctcaccttcactcgcgtgtacagccgggacgcagacatcgtcatccagtttggtgtcgcggagcacggagacgggtatcccttcgacgggaaggacgggctcctggcacacgcctttcctcctggccccggcattcagggagacgcccatttcgacgatgacgagttgtggtccctgggcaagggcgtcgtggttccaactcggtttggaaacgcagatggcgcggcctgccacttccccttcatcttcgagggccgctcctactctgcctgcaccaccgacggtcgctccgacggcttgccctggtgcagtaccacggccaactacgacaccgacgaccggtttggcttctgccccagcgagagactctacacccaggacggcaatgctgatgggaaaccctgccagtttccattcatcttccaaggccaatcctactccgcctgcaccacggacggtcgctccgacggctaccgctggtgcgccaccaccgccaactacgaccgggacaagctcttcggcttctgcccgacccgagctgactcgacggtgatggggggcaactcggcgggggagctgtgcgtcttccccttcactttcctgggtaaggagtactcgacctgtaccagcgagggccgcggagatgggcgcctctggtgcgctaccacctcgaactttgacagcgacaagaagtggggcttctgcccggaccaaggatacagtttgttcctcgtggcggcgcatgagttcggccacgcgctgggcttagatcattcctcagtgccggaggcgctcatgtaccctatgtaccgcttcactgaggggccccccttgcataaggacgacgtgaatggcatccggcacctctatggtcctcgccctgaacctgattacaaggatgacgacgataagtgataa

SEQ ID NO: 776 - DNA, 32 bp, synthetic construct
  misc_feature 1..32: note = NFAT response element 2
  source 1..32: mol_type = other DNA
aagaggaaaatttgtttcatacagaaggcgtt

SEQ ID NO: 777 - DNA, 128 bp, synthetic construct
  misc_feature 1..128: note = NFAT response element 2 repeats
  source 1..128: mol_type = other DNA
aagaggaaaatttgtttcatacagaaggcgttaagaggaaaatttgtttcatacagaaggcgttaagaggaaaatttgtttcatacagaaggcgttaagaggaaaatttgtttcatacagaaggcgtt

SEQ ID NO: 778 - DNA, 118 bp, synthetic construct
  misc_feature 1..118: note = CMV minimal promoter 2
  source 1..118: mol_type = other DNA
taggcgtgtacggtgggaggcctatataagcagagctcgtttagtgaaccgtcagatcgcctggagacgccatccacgctgttttgacctccatagaagacaccgggaccgatccagc

SEQ ID NO: 779 - DNA, 2430 bp, synthetic construct
  misc_feature 1..2430: note = NFATRE2mCMV2-MMP9
  source 1..2430: mol_type = other DNA
aagaggaaaatttgtttcatacagaaggcgttaagaggaaaatttgtttcatacagaaggcgttaagaggaaaatttgtttcatacagaaggcgttaagaggaaaatttgtttcatacagaaggcgttactagttaggcgtgtacggtgggaggcctatataagcagagctcgtttagtgaaccgtcagatcgcctggagacgccatccacgctgttttgacctccatagaagacaccgggaccgatccagcctctcgacattcgtttctagagccaccatgagcctctggcagcccctggtcctggtgctcctggtgctgggctgctgctttgctgcccccagacagcgccagtccacccttgtgctcttccctggagacctgagaaccaatctcaccgacaggcagctggcagaggaatacctgtaccgctatggttacactcgggtggcagagatgcgtggagagtcgaaatctctggggcctgcgctgctgcttctccagaagcaactgtccctgcccgagaccggtgagctggatagcgccacgctgaaggccatgcgaaccccacggtgcggggtcccagacctgggcagattccaaacctttgagggcgacctcaagtggcaccaccacaacatcacctattggatccaaaactactcggaagacttgccgcgggcggtgattgacgacgcctttgcccgcgccttcgcactgtggagcgcggtgacgccgctcaccttcactcgcgtgtacagccgggacgcagacatcgtcatccagtttggtgtcgcggagcacggagacgggtatcccttcgacgggaaggacgggctcctggcacacgcctttcctcctggccccggcattcagggagacgcccatttcgacgatgacgagttgtggtccctgggcaagggcgtcgtggttccaactcggtttggaaacgcagatggcgcggcctgccacttccccttcatcttcgagggccgctcctactctgcctgcaccaccgacggtcgctccgacggcttgccctggtgcagtaccacggccaactacgacaccgacgaccggtttggcttctgccccagcgagagactctacacccaggacggcaatgctgatgggaaaccctgccagtttccattcatcttccaaggccaatcctactccgcctgcaccacggacggtcgctccgacggctaccgctggtgcgccaccaccgccaactacgaccgggacaagctcttcggcttctgcccgacccgagctgactcgacggtgatggggggcaactcggcgggggagctgtgcgtcttccccttcactttcctgggtaaggagtactcgacctgtaccagcgagggccgcggagatgggcgcctctggtgcgctaccacctcgaactttgacagcgacaagaagtggggcttctgcccggaccaaggatacagtttgttcctcgtggcggcgcatgagttcggccacgcgctgggcttagatcattcctcagtgccggaggcgctcatgtaccctatgtaccgcttcactgaggggccccccttgcataaggacgacgtgaatggcatccggcacctctatggtcctcgccctgaacctgagccacggcctccaaccaccaccacaccgcagcccacggctcccccgacggtctgccccaccggaccccccactgtccacccctcagagcgccccacagctggccccacaggtcccccctcagctggccccacaggtccccccactgctggcccttctacggccactactgtgcctttgagtccggtggacgatgcctgcaacgtgaacatcttcgacgccatcgcggagattgggaaccagctgtatttgttcaaggatgggaagtactggcgattctctgagggcagggggagccggccgcagggccccttccttatcgccgacaagtggcccgcgctgccccgcaagctggactcggtctttgaggagcggctctccaagaagcttttcttcttctctgggcgccaggtgtgggtgtacacaggcgcgtcggtgctgggcccgaggcgtctggacaagctgggcctgggagccgacgtggcccaggtgaccggggccctccggagtggcagggggaagatgctgctgttcagcgggcggcgcctctggaggttcgacgtgaaggcgcagatggtggatccccggagcgccagcgaggtggaccggatgttccccggggtgcctttggacacgcacgacgtcttccagtaccgagagaaagcctatttctgccaggaccgcttctactggcgcgtgagttcccggagtgagttgaaccaggtggaccaagtgggctacgtgacctatgacatcctgcagtgccctgaggacgattacaaggatgacgacgataagtgataa

SEQ ID NO: 780 - DNA, 1401 bp, synthetic construct
  misc_feature 1..1401: note = NFATRE2mCMV2-MMP9cat
  source 1..1401: mol_type = other DNA
aagaggaaaatttgtttcatacagaaggcgttaagaggaaaatttgtttcatacagaaggcgttaagaggaaaatttgtttcatacagaaggcgttaagaggaaaatttgtttcatacagaaggcgttactagttaggcgtgtacggtgggaggcctatataagcagagctcgtttagtgaaccgtcagatcgcctggagacgccatccacgctgttttgacctccatagaagacaccgggaccgatccagcctcgagctctcgacattcgtttctagagccaccatgagcctctggcagcccctggtcctggtgctcctggtgctgggctgctgctttgctttccaaacctttgagggcgacctcaagtggcaccaccacaacatcacctattggatccaaaactactcggaagacttgccgcgggcggtgattgacgacgcctttgcccgcgccttcgcactgtggagcgcggtgacgccgctcaccttcactcgcgtgtacagccgggacgcagacatcgtcatccagtttggtgtcgcggagcacggagacgggtatcccttcgacgggaaggacgggctcctggcacacgcctttcctcctggccccggcattcagggagacgcccatttcgacgatgacgagttgtggtccctgggcaagggcgtcgtggttccaactcggtttggaaacgcagatggcgcggcctgccacttccccttcatcttcgagggccgctcctactctgcctgcaccaccgacggtcgctccgacggcttgccctggtgcagtaccacggccaactacgacaccgacgaccggtttggcttctgccccagcgagagactctacacccaggacggcaatgctgatgggaaaccctgccagtttccattcatcttccaaggccaatcctactccgcctgcaccacggacggtcgctccgacggctaccgctggtgcgccaccaccgccaactacgaccgggacaagctcttcggcttctgcccgacccgagctgactcgacggtgatggggggcaactcggcgggggagctgtgcgtcttccccttcactttcctgggtaaggagtactcgacctgtaccagcgagggccgcggagatgggcgcctctggtgcgctaccacctcgaactttgacagcgacaagaagtggggcttctgcccggaccaaggatacagtttgttcctcgtggcggcgcatgagttcggccacgcgctgggcttagatcattcctcagtgccggaggcgctcatgtaccctatgtaccgcttcactgaggggccccccttgcataaggacgacgtgaatggcatccggcacctctatggtcctcgccctgaacctgattacaaggatgacgacgataagtgataa

SEQ ID NO: 781 - DNA, 2238 bp, synthetic construct
  misc_feature 1..2238: note = NFATc1 Promoter fragment (P1)
  source 1..2238: mol_type = other DNA
aggcaggaggaagaggaaaggggcgcagggcgctcggggagcagagccgggggcccgcggtggccgcagaggccgggccggggcgcagaggccgggcgagctggccgcgctctgggccgccgcctccggaactccctgcgcctggcgcgcggccaccgtggtcccggcaacggcattaaacagagggaaacagacccgggattccgtcacccgggcggggggataaggacggctttgagagcagacaggaaaagggagcttttctgcatggggtgaaaaaattatttattgaaggaggaggaggcggcagcggaggaaggggaggggcgggaggaggaggaagagccggccgcccccgccccggccccggctcctcaggagccaagggcagcctcgccaggtcggtcccgggctcgaggaccgcggctggggtcgaggggctcagtctcccacgtgaccggctgggcgcgccccgccagacccggcctcgggattccctcctcccggcgagtctccgcccgccccgtcctggaggtggggagaaggagggcggggcgggggggacggaaactctccccgccaaatcctggccccaggcctggggacactcgcggcgggaagatttggaggggaggggagggggaggggcgtgggggcgcggcctcgctggagtccccctgaccccccgacccccgcccaccggcctgggcgtcctcccgcggcccctcctcccctcccggcgcccggtgctctggggcgcgtgccacgcctggctcggcgccgtaggggcccccgcaggtagagacccctggaaatggcctcgacgccgcaggagcgaggcggccaccaccccgctaatccgggcacgtctctccaggccgaggcctgcggtggaaaagccggggttccatttgtgctgagtcggggcggccgaatggagccaggcctcgggacgcgggacggacgggctctggccgcgcaccttcgcgggctctgcagcgcccgaccgcctcccccggcagggaggaggcgcttgtggggggcacccacggggcacagtgatccctgggggtctgcggacctcctgggccccgcagcagacacgagtttagcctttgggtttagtttaaatcacataagggtgtcgtgcaatcgatttatggtttctacacaccagacactttaacctccaaccccccccatccaagccaacaagaaaatgcggtgccgtgttggcagctgagctgcgcccgaagagacgcagggagacgtaagagaggaaagtgtgagtggccggggggcctccccccgtcagaagtcgcgcagtcgcgcccataaaacgccccctccgggcggctagggcaggtgagcgcgtccccgggcctccccacgccggcccctgccacagagccgtctaggtcgagcagatatttacagaataaaaatgacaataactcgacgtcccgggacggccacgcaatctgttagtaatttagcgggatgggaatttcctttctagggcctgccagtgaagcgcttttccaaatttccacagcgggggaagcctgcgattttacataatgacttcagcatgccgggctttctcgacacccctccccggcccccggcccccgccccccgccccttttccagcagggccgggctccctccggacacccgcgtggactcaggcgtcccgtctggcccgttcgcccccgtttcccccgccagccccagcgcccccctgcccggcccccggattccccgttcccgcccctacgcccccatcccctccccgtgcgcccctccccgtgcgcccccctccccgtgcgccccccctccccgtgcgcccccctccccgtgcgccccccctccccgggcgcccccctccccgggcgccccccctccccgtgcgcccccccctccccgtgcgccccccctccccgtgcgcgccccgcctcttgcgcccctgcccccaggcgagcggctgccgcggcgcggggaggggcgggcgctcggcgactcgtccccggggccccgcgcgggcccgggcagcaggggcgtgatgtcacggcagggagggggcgcgggagccgccgggccggcggggaggcgggggaggtgttttccagctttaaaaaggcaggaggcagagcgcggccctgcgtcagagcgagactcagaggctccgaactcgccggcggagtcgccgcgccagatcccagcagcagggcgcgg

SEQ ID NO: 782 - DNA, 2186 bp, synthetic construct; identical to SEQ ID NO: 646
  misc_feature 1..2186: note = NFATc1 Promoter fragment (P2)
  source 1..2186: mol_type = other DNA

SEQ ID NO: 783 - DNA, 1645 bp, synthetic construct
  misc_feature 1..1645: note = NFATc1 Promoter fragment (P3)
  source 1..1645: mol_type = other DNA
caggcctggggacactcgcggcgggaagatttggaggggaggggagggggaggggcgtgggggcgcggcctcgctggagtccccctgaccccccgacccccgcccaccggcctgggcgtcctcccgcggcccctcctcccctcccggcgcccggtgctctggggcgcgtgccacgcctggctcggcgccgtaggggcccccgcaggtagagacccctggaaatggcctcgacgccgcaggagcgaggcggccaccaccccgctaatccgggcacgtctctccaggccgaggcctgcggtggaaaagccggggttccatttgtgctgagtcggggcggccgaatggagccaggcctcgggacgcgggacggacgggctctggccgcgcaccttcgcgggctctgcagcgcccgaccgcctcccccggcagggaggaggcgcttgtggggggcacccacggggcacagtgatccctgggggtctgcggacctcctgggccccgcagcagacacgagtttagcctttgggtttagtttaaatcacataagggtgtcgtgcaatcgatttatggtttctacacaccagacactttaacctccaaccccccccatccaaagccaacaagaaaatgcggtgccgtgttggcagctgagctgcgcccgaagagacgcagggagacgtaagagaggaaagtgtgagtggccggggggcctccccccgtcagaagtcgcgcagtcgcgcccataaaacgccccctccgggcggctagggcaggtgagcgcgtccccgggcctccccacgccggcccctgccacaggccgtctaggtcgagcagatatttacagaataaaaatgacaataactcgacgtcccgggacggccacgcaatctgttagtaatttagcgggatgggaatttcctttctagggcctgccagtgaagcgcttttccaaatttccacagcgggggaagcctgcgattttacataatgacttcagcatgccgggctttctcgacacccctccccggcccccggcccccgccccccgccccttttccagcagggccgggctccctccggacacccgcgtggactcaggcgtcccgtctggcccgttcgcccccgtttcccccgccagccccagcgcccccctgcccggcccccggattccccgttcccgcccctacgcccccatcccctccccgtgcgcccctccccgtgcgcccccctccccgtgcgccccccctccccgtgcgcccccctccccgtgcgccccccctccccgggcgcccccctccccgggcgccccccctccccgtgcgcccccccctccccgtgcgccccccctccccgtgcgcgccccgcctcttgcgcccctgcccccaggcgagcggctgccgcggcgcggggaggggcgggcgctcggcgactcgtccccggggccccgcgcgggcccgggcagcaggggcgtgatgtcacggcagggagggggcgcgggagccgccgggccggcggggaggcgggggaggtgttttccagctttaaaaaggcaggaggcagagcgcggccctgcgtcagagcgagactcagaggctccgaactcgccggcggagtcgccgcgccagatcccagcagcagggcgcgg

SEQ ID NO: 784 - DNA, 927 bp, synthetic construct
  misc_feature 1..927: note = pNFAT-MMP9cat-1 gBLOCK sequence
  source 1..927: mol_type = other DNA
aagaggaaaatttgtttcatacagaaggcgttactagttaggcgtgtacggtgggaggcctatataagcagagctcgtttagtgaaccgtcagatcgcctggagacgccatccacgctgttttgacctccatagaagacaccgggaccgatccagcctctcgacattcgtttctagagccaccatgagcctctggcagcccctggtcctggtgctcctggtgctgggctgctgctttgctttccaaacctttgagggcgacctcaagtggcaccaccacaacatcacctattggatccaaaactactcggaagacttgccgcgggcggtgattgacgacgcctttgcccgcgccttcgcactgtggagcgcggtgacgccgctcaccttcactcgcgtgtacagccgggacgcagacatcgtcatccagtttggtgtcgcggagcacggagacgggtatcccttcgacgggaaggacgggctcctggcacacgcctttcctcctggccccggcattcagggagacgcccatttcgacgatgacgagttgtggtccctgggcaagggcgtcgtggttccaactcggtttggaaacgcagatggcgcggcctgccacttccccttcatcttcgagggccgctcctactctgcctgcaccaccgacggtcgctccgacggcttgccctggtgcagtaccacggccaactacgacaccgacgaccggtttggcttctgccccagcgagagactctacacccaggacggcaatgctgatgggaaaccctgccagtttccattcatcttccaaggccaatcctactccgcctgcaccacggacggtcgctccgacggctaccgctggtgcgccaccaccgccaactacgaccgggacaagctcttcggcttctgcccgacccgagctgactcg

SEQ ID NO: 785 - DNA, 1064 bp, synthetic construct
  misc_feature 1..1064: note = pNFAT-MMP9cat-2 gBLOCK sequence
  source 1..1064: mol_type = other DNA
ttcggcttctgcccgacccgagctgactcgacggtgatggggggcaactcggcgggggagctgtgcgtcttccccttcactttcctgggtaaggagtactcgacctgtaccagcgagggccgcggagatgggcgcctctggtgcgctaccacctcgaactttgacagcgacaagaagtggggcttctgcccggaccaaggatacagtttgttcctcgtggcggcgcatgagttcggccacgcgctgggcttagatcattcctcagtgccggaggcgctcatgtaccctatgtaccgcttcactgaggggccccccttgcataaggacgacgtgaatggcatccggcacctctatggtcctcgccctgaacctgattacaaggatgacgacgataagtgataagctagctcgactcgacaatcaacctctggattacaaaatttgtgaaagattgactggtattcttaactatgttgctccttttacgctatgtggatacgctgctttaatgcctttgtatcatgctattgcttcccgtatggctttcattttctcctccttgtataaatcctggttgctgtctctttatgaggagttgtggcccgttgtcaggcaacgtggcgtggtgtgcactgtgtttgctgacgcaacccccactggttggggcattgccaccacctgtcagctcctttccgggactttcgctttccccctccctattgccacggcggaactcatcgccgcctgccttgcccgctgctggacaggggctcggctgttgggcactgacaattccgtggtgttgtcggggaaatcatcgtcctttccttggctgctcgcctgtgttgccacctggattctgcgcgggacgtccttctgctacgtcccttcggccctcaatccagcggaccttccttcccgcggcctgctgccggctctgcggcctcttccgcatcttcgccttcgccctcagacgagtcggatctccctttgggccgcctccccgcctggaattaattcgagctcggtacctttaagaccaatgacttacaaggcagctgtag

SEQ ID NO: 786 - DNA, 35 bp, synthetic construct
  misc_feature 1..35: note = Primer
  source 1..35: mol_type = other DNA
tagatggtaccaagaggaaaatttgtttcatacag

SEQ ID NO: 787 - DNA, 31 bp, synthetic construct
  misc_feature 1..31: note = Primer
  source 1..31: mol_type = other DNA
tagataagcttgctggatcggtcccggtgtc

SEQ ID NO: 788 - DNA, 38 bp, synthetic construct
  misc_feature 1..38: note = Primer
  source 1..38: mol_type = other DNA
tcatacagaaggcgttactagttaggcgtgtacggtgg

SEQ ID NO: 789 - DNA, 47 bp, synthetic construct
  misc_feature 1..47: note = Primer
  source 1..47: mol_type = other DNA
acagtaccggattgccaagcttttatcacttatcgtcgtcatccttg

SEQ ID NO: 790 - DNA, 34 bp, synthetic construct
  misc_feature 1..34: note = Primer
  source 1..34: mol_type = other DNA
aagttggtaccgttccaaacctttgagggcgacc

SEQ ID NO: 791 - DNA, 34 bp, synthetic construct
  misc_feature 1..34: note = Primer
  source 1..34: mol_type = other DNA
aagttctcgagcaggttcagggcgaggaccatag

SEQ ID NO: 792 - DNA, 34 bp, synthetic construct
  misc_feature 1..34: note = Primer
  source 1..34: mol_type = other DNA
attgactcgagctctcgacattcgtttctagagc

SEQ ID NO: 793 - DNA, 36 bp, synthetic construct
  misc_feature 1..36: note = Primer
  source 1..36: mol_type = other DNA
attgaaagcttttatcacttatcgtcgtcatccttg

SEQ ID NO: 794 - DNA, 19 bp, synthetic construct
  misc_feature 1..19: note = Primer
  source 1..19: mol_type = other DNA
tagcaaaataggctgtccc

SEQ ID NO: 795 - DNA, 31 bp, synthetic construct
  misc_feature 1..31: note = Primer
  source 1..31: mol_type = other DNA
attgactcgaggctggatcggtcccggtgtc

SEQ ID NO: 796 - DNA, 50 bp, synthetic construct
  misc_feature 1..50: note = Primer
  source 1..50: mol_type = other DNA
aagacaccgggaccgatccagcctcgagagacccaagctggctagccacc

SEQ ID NO: 797 - DNA, 50 bp, synthetic construct
  misc_feature 1..50: note = Primer
  source 1..50: mol_type = other DNA
ttaccaacagtaccggattgccaagcttttatcacttatcgtcgtcatcc

SEQ ID NO: 798 - DNA, 34 bp, synthetic construct
  misc_feature 1..34: note = Primer
  source 1..34: mol_type = other DNA
attgaaagcttctctcgacattcgtttctagagc

SEQ ID NO: 799 - DNA, 32 bp, synthetic construct
  misc_feature 1..32: note = Primer
  source 1..32: mol_type = other DNA
attgagagctcttatcacttatcgtcgtcatc

SEQ ID NO: 800 - DNA, 736 bp, synthetic construct
  misc_feature 1..736: note = NFAT modif 1 gBLOCK sequence
  source 1..736: mol_type = other DNA
attctgtggataaccgtattaccgctagcatggatctcggggacgtctaactactaagcgagagtagggaactgccaggcatcaaataaaacgaaaggctcagtcggaagactgggcctttcgttttatctgttgtttgtcggtgaacgctctcctgagtaggacaaatccgccgggagcggatttgaacgttgtgaagcaacggcccggagggtggcgggcaggacgcccgccataaactgccaggcatcaaactaagcagaaggccatcctgacggatggcctttttgcgtttctacaaactcttcctgttagttagttacttaagctcgggccccaaattatgattttgttctgactgatagtgacctgttcgttgcaacaaattgataagcaatgcttttttataatgccaactttgtacaaaaaagcaggcttcgctgtgccttctagttgccagccatctgttgtttgcccctcccccgtgccttccttgaccctggaaggtgccactcccactgtcctttcctaataaaatgaggaaattgcatcgcattgtctgagtaggtgtcattctattctggggggtggggtggggcaggacagcaagggggaggattgggaagacaatagcaggcatgctggggatgcggtgggctctatggttcgaaggagatagaaccagatcttgactagtggtaccgaattccaggcctggggacactcgcggcgggaa

SEQ ID NO: 801 - DNA, 802 bp, synthetic construct
  misc_feature 1..802: note = NFAT modif 2 gBLOCK sequences
  source 1..802: mol_type = other DNA
acaaggatgacgacgataagtgataagagctcgctagcgatatcgccaccatgggggtaaaagttcttttcgcgcttatctgtatcgcggttgcagaagctaaaccaacagaaaataatgaagactttaacattgttgccgtggcatcgaacttcgccacaaccgatttggacgctgatcgcgggaaactgcccggcagccaccacggctcgcaaagctcggtttgcccggacttgcaccgttgtgggcgcgggcaagcgcatcgtgagcagcgtcgcttgcagcaccgtgggcgcggccagcaattacgcgaccacggaagccgttgttaaccacgcgaagtagcacgtcaagaagctgccgctggaggtgctcaaagagctggaagccaatgcccggaaagctggctgcaccaggggctgtctgatctgcctgtcccacatcaagtgcacgcccaagatgaagaagttcatcccaggacgctgccacacctacgaaggcgacaaagagtccgcacagggcggcataggcgaggcgatcgtcgacattcctgagattcctgggttcaaggacttggagcccctggagcagttcatcgcacaggtcgatctgtgtgtggactgcacaactggctgcctcaaagggcttgccaacgtgcagtgttctgacctgctcaagaagtggctgccgcaacgctgtgcgacctttgccagcaagatccagggccaggtggacaagatcaagggggccggtggtgactaagcggccgctcgagcatgcatctagaaataattcttactgt

SEQ ID NO: 802 - DNA, 52 bp, synthetic construct
  misc_feature 1..52: note = Primer
  source 1..52: mol_type = other DNA
acaaaattcaaaattttatcgatactagttggcctaactggccggtaccaag

SEQ ID NO: 803 - DNA, 49 bp, synthetic construct
  misc_feature 1..49: note = Primer
  source 1..49: mol_type = other DNA
atccgatttaaattcgaattcgctagcttatcacttatcgtcgtcatcc

SEQ ID NO: 804 - DNA, 13 bp, synthetic construct
  misc_feature 1..13: note = NFAT consensus sequence
  misc_feature 9: note = n is a, c, g, or t
  misc_feature 13: note = n is a, c, g, or t
  source 1..13: mol_type = other DNA
atggaaaanatcn

SEQ ID NO: 805 - DNA, 32 bp, synthetic construct; identical to SEQ ID NO: 776
  misc_feature 1..32: note = Current NFAT RE (Form System Biosciences. The sequence is from the mouse IL2 promoter
  source 1..32: mol_type = other DNA

SEQ ID NO: 806 - DNA, 812 bp, synthetic construct
  misc_feature 1..812: note = Mouse IL2 Promoter (highlighted in green the NFAT RE used, highlighted in yellow is the start codon)
  source 1..812: mol_type = other DNA
aactagagacatataaaataacaccaacatccttagatacaacccttcctgagaatttattggacatcatactctttttaaaaagcataataaacatcaagacacttacacaaaatatgttaaattaaatttaaaacaacaacgacaaaatagtacctcaagctcaacaagcattttaggtgtccttagcttactatttctctggctaactgtatgaagccatctatcaccctgtgtgcaattagctcattgtgtagataagaaggtaaaaccatcttgaaacaggaaaccaatatccttcctgtctaatcaacaaatctaaaagatttattcttttcatctatctcctcttgcgtttgtccaccacaacaggctgcttacaggttcaggatggttttgacaaagagaacattttcatgagttacttttgtgtctccaccccaaagaggaaaatttgtttcatacagaaggcgttcattgtatgaattaaaactgccacctaagtgtgggctaacccgaccaagagggatttcacctaaatccattcagtcagtgtatgggggtttaaagaaattccagagagtcatcagaagaggaaaaacaaaaggtaatgctttctgccacacaggtagactctttgaaaatatgtgtaatatgtaaaacatcgtgacacccccatattatttttccagcattaacagtataaattgcctcccatgctgaagagctgcctatcacccttgctaatcactcctcacagtgacctcaagtcctgcaggcatgtacagcatgcagctcgcatcctgtgtcac

SEQ ID NO: 807 - DNA, 30 bp, synthetic construct; identical to SEQ ID NO: 649
  misc_feature 1..30: note = NFAT RE (Form PRomega. The sequence is from the humane IL2 promoter
  source 1..30: mol_type = other DNA

SEQ ID NO: 808 - DNA, 33 bp, synthetic construct
  misc_feature 1..33: note = Possible NFAT RE from ET-1 promoter
  source 1..33: mol_type = other DNA
tccagggaaaatcggagtagaacaagagggatg

SEQ ID NO: 809 - DNA, 34 bp, synthetic construct
  misc_feature 1..34: note = Possible NFAT RE from ET-1 promoter
  source 1..34: mol_type = other DNA
actgttggaaaacgtaaacacgttattaaacggt

SEQ ID NO: 810 - DNA, 20 bp, synthetic construct
  misc_feature 1..20: note = Possible NFAT RE from human CD3?
  source 1..20: mol_type = other DNA
tccttaacggaaaaacaaaa

SEQ ID NO: 811 - DNA, 20 bp, synthetic construct
  misc_feature 1..20: note = Possible NFAT RE from human CD3?
  source 1..20: mol_type = other DNA
aaaggaaaaagtatatgttc

SEQ ID NO: 812 - DNA, 17 bp, synthetic construct
  misc_feature 1..17: note = Possible NFAT RE from human IL3 promoter
  source 1..17: mol_type = other DNA
atgccatggaaagggtg

SEQ ID NO: 813 - DNA, 22 bp, synthetic construct
  misc_feature 1..22: note = Possible NFAT RE from human GPC6
  source 1..22: mol_type = other DNA
aaggggaaatgttgagtctaga

SEQ ID NO: 814 - DNA, 17 bp, synthetic construct
  misc_feature 1..17: note = Possible NFAT RE from human growth hormone-releasing hormone
  source 1..17: mol_type = other DNA
aacttggaaaagcatag

SEQ ID NO: 815 - DNA, 5320 bp, synthetic construct
  misc_feature 1..5320: note = NFATc1 promoter large
  source 1..5320: mol_type = other DNA
ttatgccgtctagaggagacatactttctactcaaagctacacacatagactacaacgatgggaaaagacgacacaccaacagcgacttcaggaaagctggagtggctgctaatgttagacaaaataggctttttaaaaaaggttttattaaagaggaatgtttcgtaatgataaaagcactaatctgtgagaaagatacaacaatgataaacatacgtgcagctaataagagagctccaaaatctatgaagcaaaaactcacagaatgaggggagaagcagttctacaacagagaatggggacttcgatactccactttcaataatggatacaacaaccaggcagataacaaggcaacagaaggcctgaacaacagtataaaccaattagacctaccagatatctatagctagcacactccacccaacgacagcagaatacacattcttctcaagcgcacaagtaacatcctccaggatgggccatgttctaggccatcaaacaaactcaggtggtttgaggccagaggcctctcttttaaccaccacactagggccttcggaggaggcaagcagagagttgtcaaagaggccctcaggactgggtgcagtggctcatgactgtaatcccagcactttagaaggctgaggcacaaggatcttttgagctcaggagttcaagaaatgagcacttatccactgggcgcggtggctcacgccagtaatccagcactttgggaggcttaggcgggcggatcaagaggtcagaagctcaagaccagcctgaccaacatggtgaaaccccgtctctactaaaagtacaaaaattagccgggcgtggtggcgcacacctgtaatcccagctacttgggaggctgaggcaggagaatcacttgaacccgggaggtggaggttgcagtgagtggagatcacaccattgcaccccagcctgggcaacagagcgagactccgtctcaaaaaaaaaaaaaaaaaaaaagaaagaaagaaaaagaaaaaaaaagtgagcatgtattttgccagagtctggagattagaattaaattagcaaaccagaattatagaaaaagctatttacttttaagtaaacagctgagatttttttttttaagtcagtgtgaatgaagctcacagccatggttggagctgagaaagaaggatttccctttagttatgcacctgtgtcagcaccttctgactttccttctaaagtctggggtgttcctgaggatccgtaagtttggggttcagggtttctacagcatgctgttacttgtgaaacatctctttaaccatgtcccagagttgcccaggagtttaagaccagcctgagcaacatagcaagacctcatctcaacaacaacaaaaattagaaataaattagccaggtgtggtgacatgtgcctgtagtcccagctactcagaaggctgaggcatgaggatcacttgggcccaggaagttggggctgcagggagccctgttcatgccgctgcactccagcctgcaagacagagcagaaaaaaagaatcaggatcctgggcagagggaggagaggggaccggggtccagcaagcacttggggattgactgaatggcgttggggagagatgactccaaagtcctggagtgggtgagaatgactgcgagtggcttttaggtggggaggttcctgcctggccactccgggaggggacgtggggctgaagggtatcaggtgccgtgctgagcagtttggccttgatcctaatgccctggacacacgtctagggtaggaaagttgactgatccattggtgatctgagtttttagacatggtggtagtccatgaggtgggtgttcatgctaagagtttagacagggaaacctatgaagcccttagcaaccctccagggaaggggcgtggttaaagagatgtttcataagtaacagcatggtatagaaactctgaaccccaaatgtatgggtcctcaggaacaccccagactttagaaggaaagtcagaaggtgctgacacgggtgtataactaaagggaaatccttctttctcagctccaaccatggctgtgaggttcattcacactgacttaaaaaaaaaaatctcagtttacttaaaagtaaatagctttttctataattctggtttgctaatttaatcctagtctccagaccctggctaaataaatgcccatttctccagatggtctcaagagtctctggacatcgtgggggcccttccctgttggttggaaggtgcctcaggaagaagggggtggattctgagttgagtcaaaacctcaaagacccctgatgggaaaagctctcaagtgaccaccgctgtgggccagaatgcaaaactgcaggaacagaacattcgcaggaacagaacacagtcgtattaagtgattttcccgagcaggaagtggcatctggcctgcggttcagtagggggaggaaagggtgggcgcacctgcccctggctggcgcacctgccaggtagccccacgcggcaccgcgtgtgccgagcgcccctgaggatggaaagccccacgcggggcaggtggcacccaccctccgaagacgggacgggatggagcgttgagcttcggggcagctccggcccggcccgcgctggagacgcccgcatctgccaggatggcgtctcatagccctggtgctcacacatgacgccaggaagccccagcaacagtgaccgcccaggctctagaaaatattggacggggtggatgaacacccaagtgcgctccaggagaagggatttggcaccccaaggggcttttaaaacggtaagcttctaggggtgtctttgcccccaataatccatagaaacaacagtcatctaaaaatagtcttgttttctgtcctaagctccttttaactttgttagtcatcaccaatcctaaaataaaacccgtgtaacgtctcccctagtagcggctataaacaaacctacgaggaggcaggaggaagaggaaaggggcgcagggcgctcggggagcagagccgggggcccgcggtggccgcagaggccgggccggggcgcagaggccgggcgagctggccgcgctctgggccgccgcctccggaactccctgcgcctggcgcgcggccaccgtggtcccggcaacggcattaaacagagggaaacagacccgggattccgtcacccgggcggggggataaggacggctttgagagcagacaggaaaagggagcttttctgcatggggtgaaaaaattatttattgaaggaggaggaggcggcagcggaggaaggggaggggcgggaggaggaggaagagccggccgcccccgccccggccccggctcctcaggagccaagggcagcctcgccaggtcggtcccgggctcgaggaccgcggctggggtcgaggggctcagtctcccacgtgaccggctgggcgcgccccgccagacccggcctcgggattccctcctcccggcgagtctccgcccgccccgtcctggaggtggggagaaggagggcggggcgggggggacggaaactctccccgccaaatcctggccccaggcctggggacactcgcggcgggaagatttggaggggaggggagggggaggggcgtgggggcgcggcctcgctggagtccccctgaccccccgacccccgcccaccggcctgggcgtcctcccgcggcccctcctcccctcccggcgcccggtgctctggggcgcgtgccacgcctggctcggcgccgtaggggcccccgcaggtagagacccctggaaatggcctcgacgccgcaggagcgaggcggccaccaccccgctaatccgggcacgtctctccaggccgaggcctgcggtggaaaagccggggttccatttgtgctgagtcggggcggccgaatggagccaggcctcgggacgcgggacggacgggctctggccgcgcaccttcgcgggctctgcagcgcccgaccgcctcccccggcagggaggaggcgcttgtggggggcacccacggggcacagtgatccctgggggtctgcggacctcctgggccccgcagcagacacgagtttagcctttgggtttagtttaaatcacataagggtgtcgtgcaatcgatttatggtttctacacaccagacactttaacctccaaccccccccatccaaagccaacaagaaaatgcggtgccgtgttggcagctgagctgcgcccgaagagacgcagggagacgtaagagaggaaagtgtgagtggccggggggcctccccccgtcagaagtcgcgcagtcgcgcccataaaacgccccctccgggcggctagggcaggtgagcgcgtccccgggcctccccacgccggcccctgccacaggccgtctaggtcgagcagatatttacagaataaaaatgacaataactcgacgtcccgggacggccacgcaatctgttagtaatttagcgggatgggaatttcctttctagggcctgccagtgaagcgcttttccaaatttccacagcgggggaagcctgcgattttacataatgacttcagcatgccgggctttctcgacacccctccccggcccccggcccccgccccccgccccttttccagcagggccgggctccctccggacacccgcgtggactcaggcgtcccgtctggcccgttcgcccccgtttcccccgccagccccagcgcccccctgcccggcccccggattccccgttcccgcccctacgcccccatcccctccccgtgcgcccctccccgtgcgcccccctccccgtgcgccccccctccccgtgcgcccccctccccgtgcgccccccctccccgggcgcccccctccccgggcgccccccctccccgtgcgcccccccctccccgtgcgccccccctccccgtgcgcgccccgcctcttgcgcccctgcccccaggcgagcggctgccgcggcgcggggaggggcgggcgctcggcgactcgtccccggggccccgcgcgggcccgggcagcaggggcgtgatgtcacggcagggagggggcgcgggagccgccgggccggcggggaggcgggggaggtgttttccagctttaaaaaggcaggaggcagagcgcggccctgcgtcagagcgagactcagaggctccgaactcgccggcggagtcgccgcgccagatcccagcagcagggcgcgggcaccggggcgcgggcagggctcggagccaccgcgcaggtcctagggccgcggccgggccccgccacgcgcgcacacgcccctcgatg

SEQ ID NO: 816 - DNA, 361 bp, synthetic construct
  misc_feature 1..361: note = NFATc3 promoter sequence
  source 1..361: mol_type = other DNA
gcagccaggcagggtgggcgcgcgtagggggcggggccgggcgcgcggcagggcgcgagagcgcacccgcggcggcggtggcggcgactgtgggggggcggcggggaacattggctaagccgacagtggaggcttaggcaccggtggcgggcggctgcggttcctggtgctgctcggcgcgcggccagctttcggaacggaacgctcggcgtcgcgggccccgcccggaaagtttgccgtggagtcgcgacctcttggcccgcgcggcccggcatgaagcggcgttgaggagctgctgccgccgcttgccgctgccgccgccgccgcctgaggaggagctgcagcaccctgggccacgccg

SEQ ID NO: 817 - DNA, 430 bp, synthetic construct
  misc_feature 1..430: note = NFATc2 promoter sequence 1
  source 1..430: mol_type = other DNA
cagagagaggctgcgttcagactggggcactgccatcccctccgcatcatggggtctgtggaccaaggtaactgactctcgatcccttccagccttttccgctcgctcctcccggccctttcctgctgctcccgtcccgggcagcactttcagctcccggcagaggtcggtgcgggaggcctggggaccccgctcgccctcggcgcacaggtagcggggcccgcggaggggcgcccgcgccccggccagggaagggacacttgggaaggcgactttggacaactttacgcgggggcagggaagtgtcccaggccgggattccctaggccagtctgtcgggaggattttcctctccacgggacaccgggagggattctcgctactaaccgctggctgtttaaccgtttcagcactcggcttttgacagcaa

SEQ ID NO: 818 - DNA, 64 bp, synthetic construct
  misc_feature 1..64: note = NFATc2 promoter sequence 2
  source 1..64: mol_type = other DNA
catcatggggtctgtggaccaaggtaactgactctcgatcccttccagccttttccgctcgctc

SEQ ID NO: 819 - DNA, 12 bp, synthetic construct
  misc_feature 1..12: note = NFATc1 response element consensus
  source 1..12: mol_type = other DNA
cattttttccat

SEQ ID NO: 820 - skipped

SEQ ID NO: 821 - DNA, 119 bp, synthetic construct
  misc_feature 1..119: note = NFAT response elements contained within the Foxp3 enhancer region
  source 1..119: mol_type = other DNA
acttgaaaatgagataaatgttcacctatgttggcttctagtctcttttatggcttcattttttccatttactatagaggttaagagtgtgggtactggagccagactgtctgggacaa

SEQ ID NO: 822 - DNA, 1506 bp, synthetic construct
  misc_feature 1..1506: note = muE6 IgD/CD8/41BB/CD3z
  source 1..1506: mol_type = other DNA
atggccctgcccgtgaccgctttgctgctccccctggcgctgctgctgcacgccgccaggccagaggtgaaggtggtggagtctgggggagacttagtgaagcctggagggtccctgaaactctcctgtgtagtctctggattcactttcagtagatatggcatgtcttgggttcgccagactccaggcaagaggctggagtgggtcgcaaccattagtggtggcggtacttacatctactatccagacagtgtgaaggggcgattcaccatctccagagacaatgccaagaacaccctgtacctgcaaatgagcagtctgaagtctgaggacacagccatgtatcactgtacaagggataactacggtaggaactacgactacggtatggactactggggtcaaggaacctcagtcaccgtctcctcaggcggtggcggatccggcggtggcggatccggcggtggcggatcccaaattgttctcacccagtctccagcaatcatgtctgcatctccaggggaggaggtcaccctaacctgcagtgccacctcaagtgtaagttacatacactggttccagcagaggccaggcacttctcccaaactctggatttatagcacatccaacctggcttctggagtccctgttcgcttcagtggcagtggatatgggacctcttactctctcacaatcagccgaatggaggctgaagatgctgccacttattactgccagcaaaggagtagttccccattcacgttcggctcggggacaaagttggaaataaaagagtctccaaaggcacaggcctcctcagtgcccactgcacaaccccaagcagagggcagcctcgccaaggcaaccacagccccagccaccacccgtaacacaggaagaggcggcgaagagaagaaaaaggagaaggagaaagaggaacaagaagagagagagacaaagacaccaatctacatttgggccccgctcgcaggcacatgtggagtgctcctcctctccctggtgattaccctgtactgcaaaaggggccgcaaaaaactcctttacatttttaagcagccttttatgaggccagtacagacgactcaagaggaagacgggtgctcatgccgctttcctgaggaggaggaaggagggtgcgaactgcgcgttaagttctcccgatcagccgacgcgcctgcttacaagcagggccagaaccaactgtacaacgagctgaatctcggtagacgggaagagtacgacgtgttggacaaacggagaggccgcgacccagaaatgggcggcaagcctcgcaggaaaaacccccaggagggactgtacaatgagttgcagaaagataagatggcagaagcttatagcgagatcggaatgaagggggaaaggagacgagggaaaggacacgacggcctttatcagggcctgtccacagcaacaaaagatacgtatgacgccctccatatgcaggcacttccaccacggtgataa

SEQ ID NO: 823 - protein, 500 aa, synthetic construct
  REGION 1..500: note = muE6 IgD/CD8/41BB/CD3z
MALPVTALLLPLALLLHAARPEVKVVESGGDLVKPGGSLKLSCVVSGFTFSRYGMSWVRQTPGKRLEWVATISGGGTYIYYPDSVKGRFTISRDNAKNTLYLQMSSLKSEDTAMYHCTRDNYGRNYDYGMDYWGQGTSVTVSSGGGGSGGGGSGGGGSQIVLTQSPAIMSASPGEEVTLTCSATSSVSYIHWFQQRPGTSPKLWIYSTSNLASGVPVRFSGSGYGTSYSLTISRMEAEDAATYYCQQRSSSPFTFGSGTKLEIKESPKAQASSVPTAQPQAEGSLAKATTAPATTRNTGRGGEEKKKEKEKEEQEERETKTPIYIWAPLAGTCGVLLLSLVITLYCKRGRKKLLYIFKQPFMRPVQTTQEEDGCSCRFPEEEEGGCELRVKFSRSADAPAYKQGQNQLYNELNLGRREEYDVLDKRRGRDPEMGGKPRRKNPQEGLYNELQKDKMAEAYSEIGMKGERRRGKGHDGLYQGLSTATKDTYDALHMQALPPR

SEQ ID NO: 824 - DNA, 1518 bp, synthetic construct
  misc_feature 1..1518: note = muC2 IgD/CD8/41BB/CD3z
  source 1..1518: mol_type = other DNA
atggccctgcccgtgaccgctttgctgctccccctggcgctgctgctgcacgccgccaggccagaggtccagctggaggagtcagggggaggcttagtgaagcctggagggtccctgaaactctcctgtgcagcctctggattcactttcagtggctatgccatgtcttgggttcgccagactccggagaagaggctggagtgggtcgcaaccattagtagtggtggtacttatatctactatccagacagtgtgaaggggcgattcaccatctccagagacaatgccaagaacaccctgtacctgcaaatgagcagtctgaggtctgaggacacggccatgtattactgtgcaagacttgggggggataattactacgaatacttcgatgtctggggcgcagggaccacggtcaccgtctcctccggcggtggcggatccggcggtggcggatccggcggtggcggatccgacattgtgatcacacagtctacagcttccttaggtgtatctctggggcagagggccaccatctcatgcagggccagcaaaagtgtcagtacatctggctatagttatatgcactggtaccaacagagaccaggacagccacccaaactcctcatctatcttgcatccaacctagaatctggggtccctgccaggttcagtggcagtgggtctgggacagacttcaccctcaacatccatcctgtggaggaggaggatgctgcaacctattactgtcagcacagtagggagcttccgttcacgttcggaggggggaccaagctggagataaaagagtctccaaaggcacaggcctcctcagtgcccactgcacaaccccaagcagagggcagcctcgccaaggcaaccacagccccagccaccacccgtaacacaggaagaggcggcgaagagaagaaaaaggagaaggagaaagaggaacaagaagagagagagacaaagacaccaatctacatttgggccccgctcgcaggcacatgtggagtgctcctcctctccctggtgattaccctgtactgcaaaaggggccgcaaaaaactcctttacatttttaagcagccttttatgaggccagtacagacgactcaagaggaagacgggtgctcatgccgctttcctgaggaggaggaaggagggtgcgaactgcgcgttaagttctcccgatcagccgacgcgcctgcttacaagcagggccagaaccaactgtacaacgagctgaatctcggtagacgggaagagtacgacgtgttggacaaacggagaggccgcgacccagaaatgggcggcaagcctcgcaggaaaaacccccaggagggactgtacaatgagttgcagaaagataagatggcagaagcttatagcgagatcggaatgaagggggaaaggagacgagggaaaggacacgacggcctttatcagggcctgtccacagcaacaaaagatacgtatgacgccctccatatgcaggcacttccaccacggtgataa

SEQ ID NO: 825 - protein, 504 aa, synthetic construct
  REGION 1..504: note = muC2 IgD/CD8/41BB/CD3z
MALPVTALLLPLALLLHAARPEVQLEESGGGLVKPGGSLKLSCAASGFTFSGYAMSWVRQTPEKRLEWVATISSGGTYIYYPDSVKGRFTISRDNAKNTLYLQMSSLRSEDTAMYYCARLGGDNYYEYFDVWGAGTTVTVSSGGGGSGGGGSGGGGSDIVITQSTASLGVSLGQRATISCRASKSVSTSGYSYMHWYQQRPGQPPKLLIYLASNLESGVPARFSGSGSGTDFTLNIHPVEEEDAATYYCQHSRELPFTFGGGTKLEIKESPKAQASSVPTAQPQAEGSLAKATTAPATTRNTGRGGEEKKKEKEKEEQEERETKTPIYIWAPLAGTCGVLLLSLVITLYCKRGRKKLLYIFKQPFMRPVQTTQEEDGCSCRFPEEEEGGCELRVKFSRSADAPAYKQGQNQLYNELNLGRREEYDVLDKRRGRDPEMGGKPRRKNPQEGLYNELQKDKMAEAYSEIGMKGERRRGKGHDGLYQGLSTATKDTYDALHMQALPPR

SEQ ID NO: 826 - DNA, 1383 bp, synthetic construct
  misc_feature 1..1383: note = muE6 CD28/CD28/CD28/CD3z
  source 1..1383: mol_type = other DNA
atggccctgcccgtgaccgctttgctgctccccctggcgctgctgctgcacgccgccaggccagaggtgaaggtggtggagtctgggggagacttagtgaagcctggagggtccctgaaactctcctgtgtagtctctggattcactttcagtagatatggcatgtcttgggttcgccagactccaggcaagaggctggagtgggtcgcaaccattagtggtggcggtacttacatctactatccagacagtgtgaaggggcgattcaccatctccagagacaatgccaagaacaccctgtacctgcaaatgagcagtctgaagtctgaggacacagccatgtatcactgtacaagggataactacggtaggaactacgactacggtatggactactggggtcaaggaacctcagtcaccgtctcctcaggcggtggcggatccggcggtggcggatccggcggtggcggatcccaaattgttctcacccagtctccagcaatcatgtctgcatctccaggggaggaggtcaccctaacctgcagtgccacctcaagtgtaagttacatacactggttccagcagaggccaggcacttctcccaaactctggatttatagcacatccaacctggcttctggagtccctgttcgcttcagtggcagtggatatgggacctcttactctctcacaatcagccgaatggaggctgaagatgctgccacttattactgccagcaaaggagtagttccccattcacgttcggctcggggacaaagttggaaataaaaaaacacctttgtccaagtcccctatttcccggaccttctaagcccttttgggtgctggtggtggttggtggagtcctggcttgctatagcttgctagtaacagtggcctttattattttctgggtgagaagcaagcggtctcggctcctgcattctgattacatgaacatgaccccaagaagaccaggccccaccaggaaacattaccagccctacgctccgccacgcgacttcgctgcctaccggtcccgcgttaagttctcccgatcagccgacgcgcctgcttacaagcagggccagaaccaactgtacaacgagctgaatctcggtagacgggaagagtacgacgtgttggacaaacggagaggccgcgacccagaaatgggcggcaagcctcgcaggaaaaacccccaggagggactgtacaatgagttgcagaaagataagatggcagaagcttatagcgagatcggaatgaagggggaaaggagacgagggaaaggacacgacggcctttatcagggcctgtccacagcaacaaaagatacgtatgacgccctccatatgcaggcacttccaccacggtgataa

SEQ ID NO: 827 - protein, 459 aa, synthetic construct
  REGION 1..459: note = muE6 CD28/CD28/CD28/CD3z
MALPVTALLLPLALLLHAARPEVKVVESGGDLVKPGGSLKLSCVVSGFTFSRYGMSWVRQTPGKRLEWVATISGGGTYIYYPDSVKGRFTISRDNAKNTLYLQMSSLKSEDTAMYHCTRDNYGRNYDYGMDYWGQGTSVTVSSGGGGSGGGGSGGGGSQIVLTQSPAIMSASPGEEVTLTCSATSSVSYIHWFQQRPGTSPKLWIYSTSNLASGVPVRFSGSGYGTSYSLTISRMEAEDAATYYCQQRSSSPFTFGSGTKLEIKKHLCPSPLFPGPSKPFWVLVVVGGVLACYSLLVTVAFIIFWVRSKRSRLLHSDYMNMTPRRPGPTRKHYQPYAPPRDFAAYRSRVKFSRSADAPAYKQGQNQLYNELNLGRREEYDVLDKRRGRDPEMGGKPRRKNPQEGLYNELQKDKMAEAYSEIGMKGERRRGKGHDGLYQGLSTATKDTYDALHMQALPPR

SEQ ID NO: 828 - DNA, 1395 bp, synthetic construct
  misc_feature 1..1395: note = muC2 CD28/CD28/CD28/CD3z
  source 1..1395: mol_type = other DNA
atggccctgcccgtgaccgctttgctgctccccctggcgctgctgctgcacgccgccaggccagaggtccagctggaggagtcagggggaggcttagtgaagcctggagggtccctgaaactctcctgtgcagcctctggattcactttcagtggctatgccatgtcttgggttcgccagactccggagaagaggctggagtgggtcgcaaccattagtagtggtggtacttatatctactatccagacagtgtgaaggggcgattcaccatctccagagacaatgccaagaacaccctgtacctgcaaatgagcagtctgaggtctgaggacacggccatgtattactgtgcaagacttgggggggataattactacgaatacttcgatgtctggggcgcagggaccacggtcaccgtctcctccggcggtggcggatccggcggtggcggatccggcggtggcggatccgacattgtgatcacacagtctacagcttccttaggtgtatctctggggcagagggccaccatctcatgcagggccagcaaaagtgtcagtacatctggctatagttatatgcactggtaccaacagagaccaggacagccacccaaactcctcatctatcttgcatccaacctagaatctggggtccctgccaggttcagtggcagtgggtctgggacagacttcaccctcaacatccatcctgtggaggaggaggatgctgcaacctattactgtcagcacagtagggagcttccgttcacgttcggaggggggaccaagctggagataaaaaaacacctttgtccaagtcccctatttcccggaccttctaagcccttttgggtgctggtggtggttggtggagtcctggcttgctatagcttgctagtaacagtggcctttattattttctgggtgagaagcaagcggtctcggctcctgcattctgattacatgaacatgaccccaagaagaccaggccccaccaggaaacattaccagccctacgctccgccacgcgacttcgctgcctaccggtcccgcgttaagttctcccgatcagccgacgcgcctgcttacaagcagggccagaaccaactgtacaacgagctgaatctcggtagacgggaagagtacgacgtgttggacaaacggagaggccgcgacccagaaatgggcggcaagcctcgcaggaaaaacccccaggagggactgtacaatgagttgcagaaagataagatggcagaagcttatagcgagatcggaatgaagggggaaaggagacgagggaaaggacacgacggcctttatcagggcctgtccacagcaacaaaagatacgtatgacgccctccatatgcaggcacttccaccacggtgataa

SEQ ID NO: 829 - protein, 463 aa, synthetic construct
  REGION 1..463: note = muC2 CD28/CD28/CD28/CD3z
MALPVTALLLPLALLLHAARPEVQLEESGGGLVKPGGSLKLSCAASGFTFSGYAMSWVRQTPEKRLEWVATISSGGTYIYYPDSVKGRFTISRDNAKNTLYLQMSSLRSEDTAMYYCARLGGDNYYEYFDVWGAGTTVTVSSGGGGSGGGGSGGGGSDIVITQSTASLGVSLGQRATISCRASKSVSTSGYSYMHWYQQRPGQPPKLLIYLASNLESGVPARFSGSGSGTDFTLNIHPVEEEDAATYYCQHSRELPFTFGGGTKLEIKKHLCPSPLFPGPSKPFWVLVVVGGVLACYSLLVTVAFIIFWVRSKRSRLLHSDYMNMTPRRPGPTRKHYQPYAPPRDFAAYRSRVKFSRSADAPAYKQGQNQLYNELNLGRREEYDVLDKRRGRDPEMGGKPRRKNPQEGLYNELQKDKMAEAYSEIGMKGERRRGKGHDGLYQGLSTATKDTYDALHMQALPPR

SEQ ID NO: 830 - DNA, 1503 bp, synthetic construct
  misc_feature 1..1503: note = CD19 IgD/CD8/41BB/CD3z
  source 1..1503: mol_type = other DNA
atggccctgcccgtgaccgctttgctgctccccctggcgctgctgctgcacgccgccaggccagacatacagatgacgcagacgaccagcagcctttccgcttccctgggcgaccgagtaaccattagttgtagagcatctcaggatatttctaagtatctgaattggtaccaacagaaacctgatggcactgtcaagctcttgatatatcacaccagtcgactccattcaggcgtcccttccagattcagtgggagtggcagcgggactgattactccctcactatctctaacctggaacaggaagacatcgctacatacttctgtcagcagggaaacactctcccctatacctttgggggaggaaccaagttggaaataacaggcggtggcggatccggcggtggcggatccggcggtggcggatccgaggtgaaactgcaggagtcaggacctggcctggtggcgccctcacagagcctgtccgtcacatgcactgtctcaggggtctcattacccgactatggtgtaagctggattcgccagcctccacgaaagggtctggagtggctgggagtaatatggggtagtgaaaccacatactataattcagctctcaaatccagactgaccatcatcaaggacaactccaagagccaagttttcttaaaaatgaacagtctgcaaactgatgacacagccatttactactgtgccaaacattattactacggtggtagctatgctatggactactggggccaaggaacctcagtcaccgtctcctcagagtctccaaaggcacaggcctcctcagtgcccactgcacaaccccaagcagagggcagcctcgccaaggcaaccacagccccagccaccacccgtaacacaggaagaggcggcgaagagaagaaaaaggagaaggagaaagaggaacaagaagagagagagacaaagacaccaatctacatttgggccccgctcgcaggcacatgtggagtgctcctcctctccctggtgattaccctgtactgcaaaaggggccgcaaaaaactcctttacatttttaagcagccttttatgaggccagtacagacgactcaagaggaagacgggtgctcatgccgctttcctgaggaggaggaaggagggtgcgaactgcgcgttaagttctcccgatcagccgacgcgcctgcttacaagcagggccagaaccaactgtacaacgagctgaatctcggtagacgggaagagtacgacgtgttggacaaacggagaggccgcgacccagaaatgggcggcaagcctcgcaggaaaaacccccaggagggactgtacaatgagttgcagaaagataagatggcagaagcttatagcgagatcggaatgaagggggaaaggagacgagggaaaggacacgacggcctttatcagggcctgtccacagcaacaaaagatacgtatgacgccctccatatgcaggcacttccaccacggtgataa

SEQ ID NO: 831 - protein, 1512 aa, synthetic construct
  REGION 1..1512: note = CD19 IgD/CD8/41BB/CD3z
METALALEUPROVALTHRALALEULEULEUPROLEUALALEULEULEUHISALAALAARGPROASPILEGLNMETTHRGLNTHRTHRSERSERLEUSERALASERLEUGLYASPARGVALTHRILESERCYSARGALASERGLNASPILESERLYSTYRLEUASNTRPTYRGLNGLNLYSPROASPGLYTHRVALLYSLEULEUILETYRHISTHRSERARGLEUHISSERGLYVALPROSERARGPHESERGLYSERGLYSERGLYTHRASPTYRSERLEUTHRILESERASNLEUGLUGLNGLUASPILEALATHRTYRPHECYSGLNGLNGLYASNTHRLEUPROTYRTHRPHEGLYGLYGLYTHRLYSLEUGLUILETHRGLYGLYGLYGLYSERGLYGLYGLYGLYSERGLYGLYGLYGLYSERGLUVALLYSLEUGLNGLUSERGLYPROGLYLEUVALALAPROSERGLNSERLEUSERVALTHRCYSTHRVALSERGLYVALSERLEUPROASPTYRGLYVALSERTRPILEARGGLNPROPROARGLYSGLYLEUGLUTRPLEUGLYVALILETRPGLYSERGLUTHRTHRTYRTYRASNSERALALEULYSSERARGLEUTHRILEILELYSASPASNSERLYSSERGLNVALPHELEULYSMETASNSERLEUGLNTHRASPASPTHRALAILETYRTYRCYSALALYSHISTYRTYRTYRGLYGLYSERTYRALAMETASPTYRTRPGLYGLNGLYTHRSERVALTHRVALSERSERGLUSERPROLYSALAGLNALASERSERVALPROTHRALAGLNPROGLNALAGLUGLYSERLEUALALYSALATHRTHRALAPROALATHRTHRARGASNTHRGLYARGGLYGLYGLUGLULYSLYSLYSGLULYSGLULYSGLUGLUGLNGLUGLUARGGLUTHRLYSTHRPROILETYRILETRPALAPROLEUALAGLYTHRCYSGLYVALLEULEULEUSERLEUVALILETHRLEUTYRCYSLYSARGGLYARGLYSLYSLEULEUTYRILEPHELYSGLNPROPHEMETARGPROVALGLNTHRTHRGLNGLUGLUASPGLYCYSSERCYSARGPHEPROGLUGLUGLUGLUGLYGLYCYSGLULEUARGVALLYSPHESERARGSERALAASPALAPROALATYRLYSGLNGLYGLNASNGLNLEUTYRASNGLULEUASNLEUGLYARGARGGLUGLUTYRASPVALLEUASPLYSARGARGGLYARGASPPROGLUMETGLYGLYLYSPROARGARGLYSASNPROGLNGLUGLYLEUTYRASNGLULEUGLNLYSASPLYSMETALAGLUALATYRSERGLUILEGLYMETLYSGLYGLUARGARGARGGLYLYSGLYHISASPGLYLEUTYRGLNGLYLEUSERTHRALATHRLYSASPTHRTYRASPALALEUHISMETGLNALALEUPROPROARGSEQUENCELISTING
